(19) United States
(12) Patent Application Publication
(10) Pub. No.: US 2021/0347828 A1
(43) Pub. Date: Nov. 11, 2021

(54) RNA Replicon Encoding a Stabilized Corona Virus Spike Protein

(71) Applicant: Janssen Pharmaceuticals, Inc., Titusville, NJ (US)

(72) Inventors: Jason DEHART, San Diego, CA (US); Christian MAINE, San Diego, CA (US); Brett Steven MARRO, San Diego, CA (US); Johannes Petrus Maria LANGEDIJK, Amsterdam (NL); Lucy RUTTEN, Gouda (NL); Ronald VOGELS, Linschoten (NL); Marijn VAN DER NEUT KOLFSCHOTEN, Amsterdam (NL); Jaroslaw JURASZEK, Amsterdam (NL); Aneesh VIJAYAN, Sassenheim (NL)

(21) Appl. No.: 17/317,322

(22) Filed: May 11, 2021

Related U.S. Application Data
(60) Provisional application No. 63/023,150, filed on May 11, 2020.

(51) Int. Cl. C07K 14/005; C12N 15/62; A61K 39/215; A61P 31/14; C12N 15/86

(52) U.S. Cl. CPC C07K 14/005; C12N 15/62; A61K 39/215; A61P 31/14; C12N 15/86; A61K 2039/545; C07K 2319/50; C07K 2319/03; C07K 2319/01; C12N 2770/18034; C12N 2750/14143; C12N 2770/18022

(57) ABSTRACT

RNA replicons encoding stabilized recombinant pre-fusion SARS CoV-2 S proteins are described. Also described are pharmaceutical compositions and uses of the RNA replicons.

### CROSS-REFERENCE TO RELATED APPLICATION

[0001] This application claims priority to U.S. Provisional Application No. 63/023,150, filed on May 11, 2020, the disclosure of which is incorporated herein by reference in its entirety.

### REFERENCE TO SEQUENCE LISTING SUBMITTED ELECTRONICALLY

[0002] This application contains a sequence, which is submitted electronically via EFS-Web as an ASCII formatted sequence listing with a file name “JPI6050USNP1_Sequence_Listing” and a creation date of May 10, 2021 and having a size of 2.09 MB. The sequence listing submitted via EFS-Web is part of the specification and is herein incorporated by reference in its entirety.

### FIELD OF INVENTION

[0003] The present invention relates to the field of medicine. The invention, in particular, relates to a self-replicating RNA encoding a stabilized recombinant pre-fusion Corona virus spike (S) protein, in particular a SARS CoV-2 S protein, and uses thereof, e.g., in vaccines.

### BACKGROUND OF THE INVENTION

[0004] RNA replicons are replicons derived from RNA viruses, from which at least one gene encoding an essential structural protein has been deleted. See, e.g., Zimmer, Viruses, 2010, 2(2): 413-434. They are unable to produce infectious progeny but still retain the ability to replicate the viral RNA and transcribe the viral RNA polymerase. Genetic information encoded by the RNA replicon can be amplified many times, resulting in high levels of antigen expression. Additionally, replication/transcription of replicon RNA is strictly confined to the cytosol, and does not require any cDNA intermediates, nor is any recombination with or integration into the chromosomal DNA of the host required.

[0005] Corona viruses (CoVs) are enveloped viruses responsible for mild respiratory tract infections and atypical pneumonia in humans. CoVs are a large family of enveloped, single-stranded positive-sense RNA viruses belonging to the order Nidovirales, which can infect a broad range of mammalian and avian species, causing respiratory or enteric diseases. Corona viruses possess large, trimeric spike glycoproteins (S) that mediate binding to host cell receptors as well as fusion of viral and host cell membranes.

[0006] SARS-CoV-2 is a corona virus that emerged in humans from an animal reservoir in 2019 and rapidly spread globally. SARS-CoV-2 is a beta-coronavirus, like MERS-CoV and SARS-CoV, all of which have their origin in bats. The name of the disease caused by the virus is corona virus disease 2019, abbreviated as COVID-19. Symptoms of COVID-19 range from mild symptoms to severe illness and death for confirmed COVID-19 cases. In the case of SARS-CoV-2, the S protein is the major surface protein. The S protein forms homotrimers and is composed of an N-terminal 51 subunit and a C-terminal S2 subunit, responsible for receptor binding and membrane fusion, respectively. Recent cryogenic electron microscopy (cryoEM) reconstructions of the CoV trimeric S structures of alpha-, beta-, and delta-coronaviruses revealed that the 51 subunit comprises two distinct domains: an N-terminal domain (51 NTD) and a receptor-binding domain (51 RBD). SARS-CoV-2 makes use of its 51 RBD to bind to human angiotensin-converting enzyme 2 (ACE2) (Hoffmann et. al. (2020); Wrapp et. al. (2020)).

[0007] Corona viridae S proteins are classified as class I fusion proteins and are responsible for fusion. The S protein fuses the viral and host cell membranes by irreversible protein refolding from the labile pre-fusion conformation to the stable post-fusion conformation. Like many other class I fusion proteins, Corona virus S protein requires receptor binding and cleavage for the induction of conformational change that is needed for fusion and entry (Belouzard et al. (2009); Follis et al. (2006); Bosch et al. (2008), Madu et al. (2009); Walls et al. (2016)). Priming of SARS-CoV2 involves cleavage of the S protein by furin at a furin cleavage site at the boundary between the 51 and S2 subunits (S1/S2), and by TMPRS S2 at a conserved site upstream of the fusion peptide (S2′) (Bestle et al. (2020); Hoffmann et. al. (2020)).

[0008] In order to refold from the pre-fusion to the post-fusion conformation, there are two regions that need to refold, which are referred to as the refolding region 1 (RR1) and refolding region 2 (RR2) (FIG. 1). For all class I fusion proteins, the RR1 includes the fusion protein (FP) and heptad repeat 1 (HR1). After cleavage and receptor binding the stretch of helices, loops and strands of all three protomers in the trimer transform to a long continuous trimeric helical coiled coil. The FP, located at the N-terminal segment of RR1, is then able to extend away from the viral membrane and inserts in the proximal membrane of the target cell. Next, the refolding region 2 (RR2), which is located C-terminal to RR1, and closer to the transmembrane region (TM) and which includes the heptad repeat 2 (HR2), relocates to the other side of the fusion protein and binds the HR1 coiled-coil trimer with the HR2 domain to form the six-helix bundle (6HB).

[0009] When viral fusion proteins, like the SARS CoV-2 S protein, are used as vaccine components, the fusogenic function of the proteins is not important. In fact, only the mimicry of the vaccine component to the virus is important to induce reactive antibodies that can bind the virus. Therefore, for development of robust efficacious vaccine components it is desirable that the meta-stable fusion proteins are maintained in their pre-fusion conformation. It is believed that a stabilized fusion protein, such as a SARS CoV-2 S protein, in the pre-fusion conformation can induce an efficacious immune response.

[0010] In recent years, several attempts have been made to stabilize various class I fusion proteins, including Corona virus S proteins. A particularly successful approach was shown to be the stabilization of the so-called hinge loop at the end of RR1 preceding the base helix (WO2017/037196, Krarup et al. (2015); Rutten et al. (2020), Hastie et al. (2017)). This approach has also proved successful for Corona virus S proteins, as shown for SARS-CoV, MERS-CoV and SARS-CoV2 (Pallesen et al. (2016); Wrapp et al. (2020)). Although the proline mutations in the hinge loop indeed increase the expression of the Corona virus S protein, the S protein may still suffer from instability. Thus, for improved vaccine design of S proteins which can for example be used as tools, e.g. as a bait for monoclonal antibody isolation, further stabilization is desired.

[0011] Since the novel SARS-CoV-2 virus was first observed in humans in late 2019, over 150 million people have been infected and more than 3 million have died as a result of COVID-19, in particular because SARS-CoV-2, and corona viruses more generally, lack effective treatment. In addition, there is currently no vaccine available to prevent coronavirus induced disease (COVID-19), leading to a large unmet medical need. Since emerging infectious diseases, such as COVID-19, present a major threat to public health and economic systems, there is an urgent need for novel components that can be used, e.g., in vaccines to prevent coronavirus induced respiratory disease.

### SUMMARY OF THE INVENTION

[0012] The present invention provides an RNA replicon, also referred to as a self-replicating RNA molecule, encoding a stabilized pre-fusion SARS CoV-2 S protein, e.g., SARS CoV-2 S protein that is stabilized in the pre-fusion conformation, or a fragment or variant thereof.

[0013] In certain embodiments, the pre-fusion SARS CoV-2 S proteins encoded by the RNA replicon are soluble proteins, preferably trimeric soluble proteins.

[0014] In certain embodiments, an RNA replicon of the application comprises, ordered from the 5′- to 3′-end:
[0015] (1) a 5′ untranslated region (5′-UTR) required for nonstructural protein-mediated amplification of an RNA virus;
[0016] (2) a polynucleotide sequence encoding at least one, preferably all, of non-structural proteins of the RNA virus;
[0017] (3) a subgenomic promoter of the RNA virus;
[0018] (4) a polynucleotide sequence encoding the recombinant pre-fusion SARS CoV-2 S protein or the fragment or variant thereof; and
[0019] (5) a 3′ untranslated region (3′-UTR) required for nonstructural protein-mediated amplification of the RNA virus.

[0020] In certain embodiments, the self-replicating RNA molecule is an alphavirus-derived RNA replicon. In certain embodiments, the RNA replicon comprises one or more alphavirus non-structural protein genes. In certain embodiments, the RNA replicon comprises genetic elements required for RNA replication and lacks those genetic elements encoding gene products necessary for viral particle assembly, and the RNA replicon is delivered to a subject in a composition containing no viral protein, such as in a lipid composition (e.g., a lipid nanoparticle) or another suitable composition. In other embodiments, the RNA replicon comprises genetic elements required for RNA replication and those genetic elements encoding gene products necessary for viral particle assembly, and the RNA replicon is delivered to a subject in a composition containing one or more viral proteins, such as a viral like particle. In further embodiments, the RNA replicon comprises one or more modifications that enhance gene expression and/or confer a resistance to the innate immune system, such as stem-loops or downstream loops (a DLP motif) that enhance the translation of RNA under the control of a subgenomic promoter (Fovlov et al., J Virol. 1996, 70:1182-90).

[0021] In certain embodiments, examples of self-replicating RNA molecules, compositions and methods to create and use such molecules that are useful for the present invention are described in U.S. Patent Application Publication US2018/0104359, US2013/0177639, US2013/0149375, US 2014/0242152, International Patent Application Publication WO2018/075235 or U.S. Pat. No. 10,022,435, the contents of which are incorporated herein by references in their entirety.

[0022] For example, the RNA replicons can include one or more components such as a 5′ UTR, a viral capsid enhancer Downstream Loop (DLP), and an Old World alphavirus nsP3 hypervariable domain or a chimeric nsP3 hypervariable domain containing a portion of a New World alphavirus nsP3 hypervariable domain and another portion derived from an Old World alphavirus nsP3 hypervariable domain, as described in U.S. Patent Application Publications US2018/0104359, US2018/0171340, and US2020/0109178 respectively, each of which is incorporated herein by reference in its entirety.

[0023] Preferably, an RNA replicon of the application comprises, ordered from the 5′- to 3′-end,
[0024] (1) an alphavirus 5′ untranslated region (5′-UTR),
[0025] (2) a 5′ replication sequence of an alphavirus non-structural gene nsp1,
[0026] (3) a downstream loop (DLP) motif of a virus species,
[0027] (4) a polynucleotide sequence encoding an autoprotease peptide,
[0028] (5) a polynucleotide sequence encoding alphavirus non-structural proteins nsp1, nsp2, nsp3 and nsp4,
[0029] (6) an alphavirus subgenomic promoter,
[0030] (7) the polynucleotide sequence encoding the recombinant pre-fusion SARS CoV-2 S protein or the fragment or variant thereof,
[0031] (8) an alphavirus 3′ untranslated region (3′ UTR), and
[0032] (9) optionally, a poly adenosine sequence.

[0033] The invention further provides compositions, preferably immunogenic compositions, comprising an RNA replicon encoding a stabilized pre-fusion SARS CoV-2 S protein or a fragment or variant thereof of the application.

[0034] The invention also provides compositions for use in inducing an immune response against SARS CoV-2 S protein, and in particular to the use of an RNA replicon of the application as a vaccine against SARS-CoV-2 associated disease, such as COVID-19.

[0035] In an embodiment, the self-replicating RNA molecule is encapsulated in, bound to or adsorbed on a liposome, a lipoplex, a lipid nanoparticle, or combinations thereof, preferably the self-replicating RNA molecule is encapsulated in a lipid nanoparticle. Preferably, the self-replicating RNA molecule is encapsulated in a lipid nanoparticle.

[0036] The invention also relates to methods for inducing an immune response against SARS CoV-2 in a subject, comprising administering to the subject an effective amount of an RNA replicon encoding a pre-fusion SARS CoV-2 S protein or a fragment or variant thereof of the application. Preferably, the induced immune response is characterized by the induction of neutralizing antibodies to the SARS CoV-2 virus and/or protective immunity against the SARS CoV-2 virus.

[0037] In particular aspects, the invention relates to methods for inducing anti-SARS CoV-2 S protein antibodies in a subject, comprising administering to the subject an effective amount of an immunogenic composition comprising an RNA replicon encoding a pre-fusion SARS CoV-2 S protein, or a fragment or variant thereof, of the application.

[0038] In certain embodiments, the composition or vaccine is administered in a prime-boost administration of a first and a second dose, wherein the first dose primes the immune response, and the second dose boosts the immune response. The prime-boost administration can, for example, be a homologous prime-boost, wherein the first and second dose comprise the same antigen or a fragment or variant thereof (e.g., the SARS-CoV-2 spike protein) expressed from the same vector (e.g., an RNA replicon). The prime-boost administration can, for example, be a heterologous prime-boost, wherein the first and second dose comprise the same antigen or a fragment or variant thereof (e.g., the SARS-CoV-2 spike protein) expressed from the same or different vector (e.g., an RNA replicon, an adenovirus, an mRNA, or a plasmid). In some embodiments of a heterologous prime-boost administration, the first dose comprises an adenovirus vector comprising the SARS-CoV-2 spike protein or a fragment or variant thereof and a second dose comprising an RNA replicon vector comprising the SARS-CoV-2 spike protein or a fragment or variant thereof. In some embodiments of a heterologous prime-boost administration, the first dose comprises an RNA replicon vector comprising the SARS-CoV-2 spike protein or a fragment or variant thereof and a second dose comprising an adenovirus vector comprising the SARS-CoV-2 spike protein or a fragment or variant thereof. In certain aspects, the RNA replicon vaccine used in a homologous prime-boost or a heterologous prime-boost administration comprises an amino acid sequence selected from the group consisting of SEQ ID NOs: 1-3 and 5-194, or a fragment or variant thereof.

### BRIEF DESCRIPTION OF THE DRAWINGS

[0039] The foregoing summary, as well as the following detailed description of the invention, will be better understood when read in conjunction with the appended drawings. It should be understood that the invention is not limited to the precise embodiments shown in the drawings.

[0040] FIG. 1: Schematic representation of the conserved elements of the fusion domain of a SARS CoV-2 S protein. The head domain contains an N-terminal (NTD) domain, the receptor binding domain (RBD) and domains SD1 and SD2. The fusion domain contains the fusion peptide (FP), refolding region 1 (RR1), refolding region 2 (RR2), transmembrane region (TM) and cytoplasmic tail. Cleavage site between S1 and S2 and the S2′ cleavage sites are indicated with arrow

[0041] FIGS. 2A and 2B: Analytical SEC samples of semi-stable SARS-CoV-2 S trimer proteins after freeze thaw cycles. S trimer protein according to SEQ ID NO: 3 (A) and the same protein in which the tag was replaced by a C-tag (B) after flash freezing in liquid Nitrogen and thawing 1 time (dark solid line) and 5 times (light solid line), compared with unfrozen S protein (dashed line). The peak at 5 minutes corresponds to the S trimer.

[0042] FIG. 3: Percentage of S trimer expression for S proteins with indicated mutations as measured by ACE2-Fc binding in AlphaLISA assay compared with control unstable uncleaved SARS-CoV-2 S (with furin site mutation) (SEQ ID NO: 2). The recombinant S proteins tested contain a single amino acid substitution, as indicated in the figure, introduced into the backbone of unstable uncleaved SARS-CoV-2 S ectodomain (SEQ ID NO: 2) (Furin KO, left panel) and into the backbone of the semi-stable uncleaved SARS-CoV-2 S with the double proline mutations in the hinge loop at position 986 and 987 (SEQ ID NO: 3) (Furin KO+PP, right panel). Analysis was performed on crude cell culture supernatants.

[0043] FIGS. 4A-4G: Analytical SEC profile of semi-stabilized uncleaved SARS-CoV-2 S with two stabilizing mutations to Proline in the hinge loop (+PP) (SEQ ID NO: 3) (A-C) and unstable uncleaved SARS-CoV-2 S protein (SEQ ID NO: 2) (D-F) (dashed lines), compared to variants with indicated point mutations (A, D) A892P, (B, E) A942P, (C, F) D614N in black, D614M in dark grey and D614L in light grey (solid line). Analysis was performed on crude cell culture supernatants. The peak at 5 minutes corresponds to the S trimer. G) SEC-MALS with purified stabilized S protein with A942P mutation (SEQ ID NO: 5). SEC signal is shown in grey thick line and corresponding to the left axis. The black thin line shows the molar mass traces (right y axis). The dn/dc value used is 0.185.

[0044] FIG. 5: Percentage of S trimer expression for S proteins with indicated mutations as measured by ACE2-Fc binding in AlphaLISA assay compared with control unstable uncleaved SARS-CoV-2 S (with furin site mutation) (SEQ ID NO: 2). The recombinant S proteins tested contain single amino acid substitution or a disulfide bridge, as indicated in the figure, introduced into the backbone of unstable uncleaved SARS-CoV2 S ectodomain (SEQ ID NO: 2) (Furin KO, left panel) and into the backbone of semi-stable uncleaved SARS-CoV-2 S with the double proline in the hinge loop at position 986 and 987 (SEQ ID NO: 3) (Furin KO+PP, right panel). Analysis was performed on crude cell culture supernatants.

[0045] FIGS. 6A-6H: Analytical SEC profile of semi-stabilized uncleaved SARS-CoV2 S+PP (SEQ ID NO: 3) (A-D) and unstable uncleaved SARS-CoV2 S protein (SEQ ID NO: 2) (E-H) (dashed lines), compared to variants with indicated point mutation or disulfide bridge (solid line). Analysis was performed on crude cell culture supernatants. The peak at 5 minutes corresponds to the S trimer.

[0046] FIG. 7 is a schematic illustration of a self-amplifying RNA derived from an alphavirus that contains a 5′cap, nonstructural genes (NSP1-4), 26S subgenomic promoter (arrow), the SARS-CoV2 S protein (SARS-CoV2), and a 3′ polyadenylated tail.

[0047] FIGS. 8A-8E: ELISA assay results of spike protein specific antibodies elicited after homologous prime-boost administration of RNA replicon constructs (SMAART-1159 and SMAART-1158). FIG. 8A shows a schematic of the prime-boost administration. FIG. 8B shows a graph of the results of an ELISA assay for spike protein specific antibodies at day 14.

[0048] FIG. 8C shows a graph of the results of an ELISA assay for spike protein specific antibodies at day 27. FIG. 8D shows a graph of the results of an ELISA assay for spike protein specific antibodies at day 42. FIG. 8E shows a graph of the results of an ELISA assay for spike protein specific antibodies at day 54.

[0049] FIG. 9: Shows a graph of the results of neutralizing antibody production elicited at day 27 of the homologous prime-boost administration of the RNA replication constructs (SMAART-1159 and SMAART-1158).

[0050] FIGS. 10A-10B: ELISpot assay results of spike protein specific IFNγ secreting T cells in the spleens of immunized animals. FIG. 10A shows a graph of the results of the assay to measure spike protein specific IFNγ secreting T cells in the spleen at day 14. FIG. 10B shows a graph of the results of the assay to measure spike protein specific IFNγ secreting T cells in the spleen at day 54.

[0051] FIGS. 11A-11E: ELISA assay results of spike protein specific antibodies elicited after heterologous prime-boost administration of an adenoviral construct and an RNA replicon construct (Ad26NCOV030 and SMARRT-1159). FIG. 11A shows a schematic of the prime-boost administration. FIG. 11B shows a graph of the results of an ELISA assay for spike protein specific antibodies at day 14. FIG. 11C shows a graph of the results of an ELISA assay for spike protein specific antibodies at day 27. FIG. 11D shows a graph of the results of an ELISA assay for spike protein specific IgG titers at day 42. FIG. 11E shows a graph of the results of an ELISA assay for spike protein specific IgG titers at day 54.

[0052] FIGS. 12A-12B: ELISA assay results of IgG1 (FIG. 12A) and IgG2 (FIG. 12B) isotype levels in the serum.

[0053] FIG. 13: Shows a graph of the results of neutralizing antibody production elicited at day 56 of the heterologous prime-boost administration.

[0054] FIGS. 14A-14B: ELISpot results of spike protein specific IFNγ secreting T cells in the spleens of immunized animals. FIG. 14A shows a graph of the results of the assay for peptide pool 1 to measure spike protein specific IFNγ secreting T cells in the spleen. FIG. 14B shows a graph of the results of the assay for peptide pool 2 to measure spike protein specific IFNγ secreting T cells in the spleen.

### DETAILED DESCRIPTION OF THE INVENTION

[0055] As explained above, the spike protein (S) of SARS-CoV-2 and of other Corona viruses is involved in fusion of the viral membrane with a host cell membrane, which is required for infection. SARS-CoV-2 S RNA is translated into a 1273 amino acid precursor protein, which contains a signal peptide sequence at the N-terminus (e.g., amino acid residues 1-13 of SEQ ID NO: 1) which is removed by a signal peptidase in the endoplasmic reticulum. Priming of the S protein typically involves cleavage by host proteases at the boundary between the S1 and S2 subunits (S1/S2) in a subset of coronaviruses (including SARS CoV-2), and at a conserved site upstream of the fusion peptide (S2′) in all known corona viruses. For SARS-CoV-2, furin cleaves at S1/S2 between residues 685 and 686, and subsequently within S2 at the S2′ site between residues at position 815 and 816 by TMPRSS2. C-terminal to the S2′ site the proposed fusion peptide is located at the N-terminus of the refolding region 1 (FIG. 1).

[0056] A vaccine against SARS-CoV-2 infection is currently not yet available. Several vaccine modalities are possible, such as genetically based or vector-based vaccines or, e.g., subunit vaccines based on purified S protein. Since class I proteins are metastable proteins, increasing the stability of the pre-fusion conformation of fusion proteins increases the expression level of the protein because less protein will be misfolded, and more protein will successfully transport through the secretory pathway. Therefore, if the stability of the pre-fusion conformation of the class I fusion protein, like SARS CoV-2 S protein is increased, the immunogenic properties of a vector-based vaccine will be improved since the expression of the S protein is higher and the conformation of the immunogen resembles the pre-fusion conformation that is recognized by potent neutralizing and protective antibodies. For subunit-based vaccines, stabilizing the pre-fusion S conformation is even more important. Besides the importance of high expression, which is needed to manufacture a vaccine successfully, maintenance of the pre-fusion conformation during the manufacturing process and during storage over time is critical for protein-based vaccines. In addition, for a soluble, subunit-based vaccine, the SARS CoV-2 S protein needs to be truncated by deletion of the transmembrane (TM) and the cytoplasmic region to create a soluble secreted S protein (sS). Because the TM region is responsible for membrane anchoring and increases stability, the anchorless soluble S protein is considerably more labile than the full-length protein and will even more readily refold into the post-fusion end-state. In order to obtain soluble S protein in the stable pre-fusion conformation that shows high expression levels and high stability, the pre-fusion conformation thus needs to be stabilized. Because also the full length (membrane-bound) SARS CoV-2 S protein is metastable, the stabilization of the pre-fusion conformation is also desirable for the full-length SARS CoV-2 S protein, i.e., including the TM and cytoplasmic region, e.g., for any DNA, RNA, live attenuated, or vector-based vaccine approach.

[0057] The present invention thus provides stabilized, recombinant pre-fusion SARS CoV-2 S proteins or fragments or variants thereof, comprising an S1 and an S2 domain, and comprising at least one mutation selected from the group consisting of a mutation of at least one amino acid in the loop region corresponding to amino acid residues 941-945 into a proline (P), a mutation of the amino acid at position 892, a mutation of the amino acid at position 614, a mutation of the amino acid at position 572, a mutation of the amino acid at position 532, a disulfide bridge between residues 880 and 888, and a disulfide bridge between residues 884 and 893, wherein the numbering of the amino acid positions is according to the numbering of the amino acid positions in SEQ ID NO: 1, and fragments thereof. According to the invention it has been demonstrated that the presence of specific amino acids and/or a disulfide bridge at the indicated positions increases the stability of the proteins in the pre-fusion conformation. According to the invention, the specific amino acids or disulfide bridges are introduced by substitution (mutation) of the amino acid at that position into a specific amino acid according to the invention. According to the invention, the proteins thus comprise one or more mutations in their amino acid sequence, i.e., the naturally occurring amino acid at these positions has been substituted with another amino acid. In certain embodiments, the proteins or fragments or variants thereof comprise an amino acid sequence, wherein the amino acid at position 892 is not alanine (A), the amino acid at position 614 is not aspartic acid (D) or glycine (G), the amino acid at position 532 is not asparagine (N) and/or amino acid at position 572 is not threonine (T).

[0058] In certain embodiments, the proteins or fragments or variants thereof comprise at least two mutations comprising a mutation of at least one amino acid in the loop region corresponding to amino acid residues 941-945 into proline (P), and a mutation selected from the group consisting of a mutation of the amino acid at position 892, a mutation of the amino acid at position 614, a mutation of the amino acid at position 572, a mutation of the amino acid at position 532, a disulfide bridge between residues 880 and 888 and a disulfide bridge between residues 884 and 893.

[0059] In certain embodiments, the proteins or fragments or variants thereof comprise at least two mutations comprising a mutation of at least one amino acid in the loop region corresponding to amino acid residues 941-945 into proline (P), and a mutation selected from the group consisting of a mutation of the amino acid at position 892, a mutation of the amino acid at position 614, a mutation of the amino acid at position 572 and a mutation of the amino acid at position 532, a disulfide bridge between residues 880 and 888 and a disulfide bridge between residues 884 and 893, provided that the proteins do not comprise both the disulfide bridge between residues 880 and 888 and the disulfide bridge between residues 884 and 893.

[0060] In certain embodiments, the proteins or fragments or variants thereof thus comprise a mutation of at least one amino acid in the loop region corresponding to amino acid residues 941-945 into proline (P), a mutation of the amino acid at position 892, a mutation of the amino acid at position 614, a mutation of the amino acid at position 572, and/or a mutation of the amino acid at position 532, and/or either a disulfide bridge between residues 880 and 888 or a disulfide bridge between residues 884 and 893.

[0061] In a preferred embodiment, the disulfide bridge is a disulfide bridge between residues 880 and 888. According to the invention it is to be understood that “a disulfide bridge between residues 880 and 880” means that the amino acids at the positions 880 and 888 have been mutated into cysteine (C). Similarly, it is to be understood that “a disulfide bridge between residues 884 and 893” means that the amino acids at the positions 884 and 893 have been mutated into cysteine (C).

[0062] In certain embodiments, the at least one mutation in the loop region corresponding to amino acid residues 941-945 is a mutation of the amino acid at position 942 into proline (P).

[0063] In certain embodiments, the mutation at position 892 is a mutation into proline (P).

[0064] In certain embodiments, the mutation at position 614 is a mutation into asparagine (N).

[0065] In certain embodiments, the mutation at position 532 is a mutation into proline (P).

[0066] In certain embodiments, the mutation at position 572 is a mutation into isoleucine (I).

[0067] In certain preferred embodiments, the proteins or fragments or variants thereof comprise a mutation of the amino acid at position 942 into P, a disulfide bridge between the amino acid residues at positions 880 and 888, and a mutation of the amino acid at position 614 into N.

[0068] An amino acid according to the invention can be any of the twenty naturally occurring (or ‘standard’ amino acids) or variants thereof, such as, e.g., D-amino acids (the D-enantiomers of amino acids with a chiral center), or any variants that are not naturally found in proteins, such as, e.g., norleucine. The standard amino acids can be divided into several groups based on their properties. Important factors are charge, hydrophilicity or hydrophobicity, size and functional groups. These properties are important for protein structure and protein—protein interactions. Some amino acids have special properties such as cysteine, that can form covalent disulfide bonds (or disulfide bridges) to other cysteine residues, proline that induces turns of the polypeptide backbone, and glycine that is more flexible than other amino acids. Table 1 shows the abbreviations and properties of the standard amino acids.

[0069] It will be appreciated by a skilled person that the mutations can be made to the protein or fragment or variant thereof by routine molecular biology procedures.

[0070] In certain embodiments, the present invention provides recombinant SARS-CoV-2 S proteins, and fragments or variants thereof, wherein the amino acid at position 942 is P, the amino acid at position 892 is P, the amino acid at position 614 is N, the amino acid at position 532 is P and/or the amino acid at position 572 is I, and/or which comprise a disulfide bridge between residues 880 and 888 or a disulfide bridge between residues 884 and 893, wherein the numbering of the amino acid positions is according to the numbering of the amino acid positions in SEQ ID NO: 1.

[0071] In certain embodiments, the SARS CoV-2 S proteins or fragments or variants thereof further comprise a deletion of the furin cleavage site. A deletion of the furin cleavage, e.g., by mutation of one or more amino acids in the furin cleavage site (such that the protein is not cleaved by furin), renders the protein uncleaved, which further increases its stability. Deleting the furin cleavage site can be achieved in any suitable way that is known to the skilled person. In certain embodiments, the deletion of the furin cleavage site comprises a mutation of the amino acid at position 682 into serine (S) and/or a mutation of the amino acid at position 685 into glycine (G).

[0072] In certain embodiments, the proteins or fragments or variants thereof further comprise a mutation of the amino acids at position 986 and 987 into proline (P).

[0073] In certain embodiments, the invention provides SARS-CoV 2 proteins or fragments or variants thereof comprising an amino acid sequence selected from the group consisting of SEQ ID NO: 5-194 or fragments or variants thereof.

[0074] The term “fragment” as used herein refers to a peptide that has an amino-terminal and/or carboxy-terminal and/or internal deletion, but where the remaining amino acid sequence is identical to the corresponding positions in the sequence of a SARS CoV-2 S protein, for example, the full-length sequence of a SARS CoV-2 S protein. It will be appreciated that for inducing an immune response and in general for vaccination purposes, a protein needs not to be full length nor have all its wild type functions, and fragments of the protein are equally useful. A fragment according to the invention is an immunologically active fragment, and typically comprises at least 15 amino acids, or at least 30 amino acids, of the SARS CoV-2 S protein. In certain embodiments, it comprises at least 50, 75, 100, 150, 200, 250, 300, 350, 400, 450, 500, or 550 amino acids, of the SARS CoV-2 S protein.

[0075] The term “variant” as used herein refers to a SARS CoV-2 S protein that comprises a substitution or deletion of at least one amino acid from the wild type SARS CoV-2 S protein sequence (SEQ ID NO:1). A variant can be naturally or non-naturally occurring. A variant can comprise at least one, at least two, at least three, at least four, at least five, or at least ten substitution or deletions as compared to the wild type SARS CoV-2 S protein sequence (SEQ ID NO:1). In certain embodiments, a variant can, for example, be greater than 95% identical with the wild type SARS CoV-2 S protein sequence (SEQ ID NO:1). Examples of SARS CoV-2 protein variants can include, but are not limited to, the B.1.1.7, B.1.351, P.1, B.1.427, and B.1.429, B.1.526, B.1.526.1, B.1.525, B.1.617, B.1.617.1, B.1.617.2, B.1.617.3, and P.2 variants, as described on cdc.gov/coronavirus/2019-ncov/cases-updates/variant-surveillance/variant-info.html accessed on May 10, 2021.

[0076] In certain embodiments, the proteins according to the invention are soluble proteins, e.g., S protein ectodomains, and comprise a truncated S2 domain. As used herein a “truncated” S2 domain refers to a S2 domain that is not a full length S2 domain, i.e., wherein either N-terminally or C-terminally one or more amino acid residues have been deleted. According to the invention, at least the transmembrane domain and cytoplasmic domain are deleted to permit expression as a soluble ectodomain. For the stabilization of such soluble SARS CoV-2 S protein in the pre-fusion conformation, a heterologous trimerization domain, such as a fibritin—based trimerization domain, may be fused to the C-terminus of the Corona virus S protein ectodomain. This fibritin domain or ‘Foldon’ is derived from T4 fibritin and was described earlier as an artificial natural trimerization domain (Letarov et al., (1993); S-Guthe et al., (2004)). Thus, in certain embodiments, the transmembrane region has been replaced by a heterologous trimerization domain. In a preferred embodiment, the heterologous trimerization domain is a foldon domain comprising the amino acid sequence of SEQ ID NO:4. However, it is to be understood that according to the invention other trimerization domains are also possible.

[0077] The pre-fusion SARS CoV-2 S proteins or fragments or variants thereof according to the invention are stable, i.e., do not readily change into the post-fusion conformation upon processing of the proteins, such as, e.g., upon purification, freeze-thaw cycles, and/or storage, etc. In certain embodiments, the pre-fusion SARS CoV-2 S proteins or fragments or variants have an increased stability as compared to SARS CoV-2 S proteins or fragments or variants without the mutations of the invention, e.g., as indicated by an increased melting temperature (measured by, e.g., differential scanning fluorimetry).

[0078] The proteins according to the invention may comprise a signal peptide, also referred to as signal sequence or leader peptide, corresponding to amino acids 1-13 of SEQ ID NO: 1. Signal peptides are short (typically 5-30 amino acids long) peptides present at the N-terminus of the majority of newly synthesized proteins that are destined towards the secretory pathway. In certain embodiments, the proteins according to the invention do not comprise a signal peptide.

[0079] In certain embodiments, the proteins comprise a tag sequence, such as a HIS-Tag or C-Tag. A His-Tag (or polyhistidine-tag) is an amino acid motif in proteins that consists of at least five histidine (H) residues, preferably placed at the N- or C-terminus of the protein, which is generally used for purification purposes. In certain embodiments, the proteins according to the invention do not comprise a tag sequence. Alternatively, other tags like a C-tag can be used for these purposes.

[0080] The invention also provides methods for stabilizing a SARS CoV-2 S protein, said method comprising introducing in the amino acid sequence of a SARS CoV-2 S protein at least one mutation selected from the group consisting of a mutation of at least one amino acid in the loop region corresponding to amino acid residues 941-945 into proline (P), a mutation of the amino acid at position 892, a mutation of the amino acid at position 614, a mutation of the amino acid at position 572, a mutation of the amino acid at position 532, a disulfide bridge between residues 880 and 888, and a disulfide bridge between residues 884 and 893, wherein the numbering of the amino acid positions is according to the numbering of the amino acid positions in SEQ ID NO: 1.

[0081] In certain embodiments, the methods comprise introducing at least two mutations comprising a mutation of at least one amino acid in the loop region corresponding to amino acid residues 941-945 into proline (P), and a mutation selected from the group consisting of a mutation of the amino acid at position 892, a mutation of the amino acid at position 614, a mutation of the amino acid at position 572, a mutation of the amino acid at position 532, a disulfide bridge between residues 880 and 888 and a disulfide bridge between residues 884 and 893.

[0082] In certain embodiments, the methods comprise introducing at least two mutations comprising a mutation of at least one amino acid in the loop region corresponding to amino acid residues 941-945 into proline (P), and a mutation selected from the group consisting of a mutation of the amino acid at position 892, a mutation of the amino acid at position 614, a mutation of the amino acid at position 572, a mutation of the amino acid at position 532, a disulfide bridge between residues 880 and 888 and a disulfide bridge between residues 884 and 893, provided that the proteins do not comprise both the disulfide bridge between residues 880 and 888 and the disulfide bridge between residues 884 and 893.

[0083] In certain embodiments, the at least one mutation in the loop region corresponding to amino acid residues 941-945 is a mutation of the amino acid at position 942 into proline (P).

[0084] In certain embodiments, the mutation at position 892 is a mutation into proline (P).

[0085] In certain embodiments, the mutation at position 614 is a mutation into asparagine (N).

[0086] In certain embodiments, the mutation at position 532 is a mutation into proline (P).

[0087] In certain embodiments, the mutation at position 572 is a mutation into isoleucine (I).

[0088] In certain embodiments, the methods further comprise deleting the furin cleavage site. Deleting the furin cleavage site may be achieved in any way known in the art. In certain embodiments, the deletion of the furin cleavage site comprises introducing a mutation of the amino acid at position 682 into serine (S) and/or a mutation of the amino acid at position 685 into glycine (G).

[0089] In certain embodiments, the methods further comprise introducing a mutation of the amino acids at position 986 and 987 into proline (P).

[0090] The invention also provided SARS CoV-2 proteins obtainable by the methods described herein.

[0091] The present invention further provides nucleic acid molecules encoding the SARS CoV-2 S proteins or fragments or variants thereof according to the invention. The term “nucleic acid molecule” as used in the present invention refers to a polymeric form of nucleotides (i.e., polynucleotides) and includes both DNA (e.g., cDNA, genomic DNA) and RNA, and synthetic forms and mixed polymers of the above.

[0092] In preferred embodiments, the nucleic acid molecules encoding the proteins or fragments or variants thereof according to the invention are codon-optimized for expression in mammalian cells, preferably human cells, or insect cells. Methods of codon-optimization are known and have been described previously (e.g., WO 96/09378 for mammalian cells). A sequence is considered codon-optimized if at least one non-preferred codon as compared to a wild type sequence is replaced by a codon that is more preferred. Herein, a non-preferred codon is a codon that is used less frequently in an organism than another codon coding for the same amino acid, and a codon that is more preferred is a codon that is used more frequently in an organism than a non-preferred codon. The frequency of codon usage for a specific organism can be found in codon frequency tables, such as in world wide web site: kazusa.or.jp/codon. Preferably, more than one non-preferred codon, preferably most or all non-preferred codons, are replaced by codons that are more preferred. Preferably, the most frequently used codons in an organism are used in a codon-optimized sequence. Replacement by preferred codons generally leads to higher expression.

[0093] It will be understood by a skilled person that numerous different polynucleotides and nucleic acid molecules can encode the same protein or fragment or variant thereof as a result of the degeneracy of the genetic code. It is also understood that skilled persons may, using routine techniques, make nucleotide substitutions that do not affect the protein sequence encoded by the nucleic acid molecules to reflect the codon usage of any particular host organism in which the proteins are to be expressed. Therefore, unless otherwise specified, a “nucleotide sequence encoding an amino acid sequence” includes all nucleotide sequences that are degenerate versions of each other and that encode the same amino acid sequence. Nucleotide sequences that encode proteins and RNA may or may not include introns.

[0094] Nucleic acid sequences can be cloned using routine molecular biology techniques, or generated de novo by DNA synthesis, which can be performed using routine procedures by service companies having business in the field of DNA synthesis and/or molecular cloning (e.g., GeneArt, GenScript, Invitrogen, Eurofins).

[0095] The invention also provides vectors comprising a nucleic acid molecule as described above. In certain embodiments, a nucleic acid molecule according to the invention thus is part of a vector. Such vectors can easily be manipulated by methods well known to the person skilled in the art and can for instance be designed for being capable of replication in prokaryotic and/or eukaryotic cells. In addition, many vectors can be used for transformation of eukaryotic cells and will integrate in whole or in part into the genome of such cells, resulting in stable host cells comprising the desired nucleic acid in their genome. The vector used can be any vector that is suitable for cloning DNA and that can be used for transcription of a nucleic acid of interest.

[0096] Preferably, the vector is a self-replicating RNA replicon.

[0097] As used herein, “self-replicating RNA molecule,” which is used interchangeably with “self-amplifying RNA molecule” or “RNA replicon” or “replicon RNA” or “saRNA,” refers to an RNA molecule engineered from genomes of plus-strand RNA viruses that contains all of the genetic information required for directing its own amplification or self-replication within a permissive cell. A self-replicating RNA molecule resembles mRNA. It is single-stranded, 5′-capped, and 3′-poly-adenylated and is of positive orientation. To direct its own replication, the RNA molecule 1) encodes polymerase, replicase, or other proteins which can interact with viral or host cell-derived proteins, nucleic acids or ribonucleoproteins to catalyze the RNA amplification process; and 2) contain cis-acting RNA sequences required for replication and transcription of the subgenomic replicon-encoded RNA. Thus, the delivered RNA leads to the production of multiple daughter RNAs. These daughter RNAs, as well as collinear subgenomic transcripts, can be translated themselves to provide in situ expression of a gene of interest, or can be transcribed to provide further transcripts with the same sense as the delivered RNA which are translated to provide in situ expression of the gene of interest. The overall result of this sequence of transcriptions is a huge amplification in the number of the introduced replicon RNAs and so the encoded gene of interest becomes a major polypeptide product of the cells.

[0098] In certain embodiment, an RNA replicon of the application comprises, ordered from the 5′- to 3′-end: (1) a 5′ untranslated region (5′-UTR) required for nonstructural protein-mediated amplification of an RNA virus; (2) a polynucleotide sequence encoding at least one, preferably all, of non-structural proteins of the RNA virus; (3) a subgenomic promoter of the RNA virus; (4) a polynucleotide sequence encoding the recombinant pre-fusion SARS CoV-2 S protein or the fragment or variant thereof; and (5) a 3′ untranslated region (3′-UTR) required for nonstructural protein-mediated amplification of the RNA virus.

[0099] In certain embodiments, a self-replicating RNA molecule encodes an enzyme complex for self-amplification (replicase polyprotein) comprising an RNA-dependent RNA-polymerase function, helicase, capping, and poly-adenylating activity. The viral structural genes downstream of the replicase, which are under control of a subgenomic promoter, can be replaced by a pre-fusion SARS CoV-2 S protein or the fragment or variant thereof described herein. Upon transfection, the replicase is translated immediately, interacts with the 5′ and 3′ termini of the genomic RNA, and synthesizes complementary genomic RNA copies. Those act as templates for the synthesis of novel positive-stranded, capped, and poly-adenylated genomic copies, and subgenomic transcripts. Amplification eventually leads to very high RNA copy numbers of up to 2×10⁵ copies per cell. Thus, much lower amounts of saRNA compared to conventional mRNA suffice to achieve effective gene transfer and protective vaccination (Beissert et al., Hum Gene Ther. 2017, 28(12): 1138-1146).

[0100] Subgenomic RNA is an RNA molecule of a length or size which is smaller than the genomic RNA from which it was derived. The viral subgenomic RNA can be transcribed from an internal promoter, whose sequences reside within the genomic RNA or its complement. Transcription of a subgenomic RNA can be mediated by viral-encoded polymerase(s) associated with host cell-encoded proteins, ribonucleoprotein(s), or a combination thereof. Numerous RNA viruses generate subgenomic mRNAs (sgRNAs) for expression of their 3′-proximal genes.

[0101] In some embodiments of the present disclosure, a pre-fusion SARS CoV-2 S protein or a fragment or variant thereof thereof described herein is expressed under the control of a subgenomic promoter. In certain embodiments, instead of the native subgenomic promoter, the subgenomic RNA can be placed under control of internal ribosome entry site (IRES) derived from encephalomyocarditis viruses (EMCV), Bovine Viral Diarrhea Viruses (BVDV), polioviruses, Foot-and-mouth disease viruses (FMD), enterovirus 71, or hepatitis C viruses. Subgenomic promoters range from 24 nucleotide (Sindbis virus) to over 100 nucleotides (Beet necrotic yellow vein virus) and are usually found upstream of the transcription start.

[0102] In some embodiments, the RNA replicon includes the coding sequence for at least one, at least two, at least three, or at least four nonstructural viral proteins (e.g., nsP1, nsP2, nsP3, nsP4). Alphavirus genomes encode non-structural proteins nsP1, nsP2, nsP3, and nsP4, which are produced as a single polyprotein precursor, sometimes designated P1234 (or nsP1-4 or nsP1234), and which is cleaved into the mature proteins through proteolytic processing. nsP1 can be about 60 kDa in size and may have methyltransferase activity and be involved in the viral capping reaction. nsP2 has a size of about 90 kDa and may have helicase and protease activity while nsP3 is about 60 kDa and contains three domains: a macrodomain, a central (or alphavirus unique) domain, and a hypervariable domain (HVD). nsP4 is about 70 kDa in size and contains the core RNA-dependent RNA polymerase (RdRp) catalytic domain. After infection the alphavirus genomic RNA is translated to yield a P1234 polyprotein, which is cleaved into the individual proteins. In disclosing the nucleic acid or polypeptide sequences herein, for example sequences of nsP1, nsP2, nsP3, nsP4, also disclosed are sequences considered to be based on or derived from the original sequence.

[0103] In some embodiments, RNA replicon includes the coding sequence for a portion of the at least one nonstructural viral protein. For example, the RNA replicon can include about 10%, 20%, 30%, 40%, 50%, 60%, 70%, 80%, 90%, 95%, 100%, or a range between any two of these values, of the encoding sequence for the at least one nonstructural viral protein. In some embodiments, the RNA replicon can include the coding sequence for a substantial portion of the at least one nonstructural viral protein. As used herein, a “substantial portion” of a nucleic acid sequence encoding a nonstructural viral protein comprises enough of the nucleic acid sequence encoding the nonstructural viral protein to afford putative identification of that protein, either by manual evaluation of the sequence by one skilled in the art, or by computer-automated sequence comparison and identification using algorithms such as BLAST (see, for example, in “Basic Local Alignment Search Tool”; Altschul S F et al., J. Mol. Biol. 215:403-410, 1993). In some embodiments, the RNA replicon can include the entire coding sequence for the at least one nonstructural protein. In some embodiments, the RNA replicon comprises substantially all the coding sequence for the native viral nonstructural proteins. In certain embodiments, the one or more nonstructural viral proteins are derived from the same virus. In other embodiments, the one or more nonstructural proteins are derived from different viruses.

[0104] The RNA replicon can be derived from any suitable plus-strand RNA viruses, such as alphaviruses or flaviviruses. Preferably, the RNA replicon is derived from alphaviruses. The term “alphavirus” describes enveloped single-stranded positive sense RNA viruses of the family Togaviridae. The genus alphavirus contains approximately 30 members, which can infect humans as well as other animals. Alphavirus particles typically have a 70 nm diameter, tend to be spherical or slightly pleomorphic, and have a 40 nm isometric nucleocapsid. The total genome length of alphaviruses ranges between 11,000 and 12,000 nucleotides and has a 5′cap and 3′ poly-A tail. There are two open reading frames (ORF's) in the genome, non-structural (ns) and structural. The ns ORF encodes proteins (nsP1-nsP4) necessary for transcription and replication of viral RNA. The structural ORF encodes three structural proteins: the core nucleocapsid protein C, and the envelope proteins P62 and El that associate as a heterodimer. The viral membrane-anchored surface glycoproteins are responsible for receptor recognition and entry into target cells through membrane fusion. The four ns protein genes are encoded by genes in the 5′ two-thirds of the genome, while the three structural proteins are translated from a subgenomic mRNA colinear with the 3′ one-third of the genome.

[0105] In some embodiments, the self-replicating RNA useful for the invention is an RNA replicon derived from an alphavirus virus species. In some embodiments, the alphavirus RNA replicon is of an alphavirus belonging to the VEEV/EEEV group, or the SF group, or the SIN group. Non-limiting examples of SF group alphaviruses include Semliki Forest virus, O'Nyong-Nyong virus, Ross River virus, Middelburg virus, Chikungunya virus, Barmah Forest virus, Getah virus, Mayaro virus, Sagiyama virus, Bebaru virus, and Una virus. Non-limiting examples of SIN group alphaviruses include Sindbis virus, Girdwood S. A. virus, South African Arbovirus No. 86, Ockelbo virus, Aura virus, Babanki virus, Whataroa virus, and Kyzylagach virus. Non-limiting examples of VEEV/EEEV group alphaviruses include Eastern equine encephalitis virus (EEEV), Venezuelan equine encephalitis virus (VEEV), Everglades virus (EVEV), Mucambo virus (MUCV), Pixuna virus (PIXV), Middleburg virus (MIDV), Chikungunya virus (CHIKV), O'Nyong-Nyong virus (ONNV), Ross River virus (RRV), Barmah Forest virus (BF), Getah virus (GET), Sagiyama virus (SAGV), Bebaru virus (BEBV), Mayaro virus (MAYV), and Una virus (UNAV).

[0106] Non-limiting examples of alphavirus species include Eastern equine encephalitis virus (EEEV), Venezuelan equine encephalitis virus (VEEV), Everglades virus (EVEV), Mucambo virus (MUCV), Semliki forest virus (SFV), Pixuna virus (PIXV), Middleburg virus (MIDV), Chikungunya virus (CHIKV), O'Nyong-Nyong virus (ONNV), Ross River virus (RRV), Barmah Forest virus (BF), Getah virus (GET), Sagiyama virus (SAGV), Bebaru virus (BEBV), Mayaro virus (MAYV), Una virus (UNAV), Sindbis virus (SINV), Aura virus (AURAV), Whataroa virus (WHAV), Babanki virus (BABV), Kyzylagach virus (KYZV), Western equine encephalitis virus (WEEV), Highland J virus (HJV), Fort Morgan virus (FMV), Ndumu (NDUV), and Buggy Creek virus. Virulent and avirulent alphavirus strains are both suitable. In some embodiments, the alphavirus RNA replicon is of a Sindbis virus (SIN), a Semliki Forest virus (SFV), a Ross River virus (RRV), a Venezuelan equine encephalitis virus (VEEV), or an Eastern equine encephalitis virus (EEEV). In some embodiments, the alphavirus RNA replicon is of a Venezuelan equine encephalitis virus (VEEV).

[0107] In certain embodiments, a self-replicating RNA molecule comprises a polynucleotide encoding one or more nonstructural proteins nsp1-4, a subgenomic promoter, such as 26S subgenomic promoter, and a gene of interest encoding a pre-fusion SARS CoV-2 S protein or the fragment thereof described herein.

[0108] A self-replicating RNA molecule can have a 5′ cap (e.g., a 7-methylguanosine). This cap can enhance in vivo translation of the RNA.

[0109] The 5′ nucleotide of a self-replicating RNA molecule useful with the invention can have a 5′ triphosphate group. In a capped RNA this can be linked to a 7-methylguanosine via a 5′-to-5′ bridge. A 5′ triphosphate can enhance RIG-I binding.

[0110] A self-replicating RNA molecule can have a 3′ poly-A tail. It can also include a poly-A polymerase recognition sequence (e.g., AAUAAA) near its 3′ end.

[0111] In any of the embodiments of the present disclosure, the RNA replicon can lack (or not contain) the coding sequence(s) of at least one (or all) of the structural viral proteins (e.g., nucleocapsid protein C, and envelope proteins P62, 6K, and E1). In these embodiments, the sequences encoding one or more structural genes can be substituted with one or more heterologous sequences such as, for example, a coding sequence for a pre-fusion SARS CoV-2 S protein or the fragment thereof described herein.

[0112] In certain embodiments, a self-replicating RNA vector of the application comprises one or more features to confer a resistance to the translation inhibition by the innate immune system or to otherwise increase the expression of the GOI (e.g., a pre-fusion SARS CoV-2 S protein or the fragment thereof described herein).

[0113] In certain embodiments, the RNA sequence can be codon optimized to improve translation efficiency. The RNA molecule can be modified by any method known in the art in view of the present disclosure to enhance stability and/or translation, such by adding a polyA tail, e.g., of at least 30 adenosine residues; and/or capping the 5-end with a modified ribonucleotide, e.g., 7-methylguanosine cap, which can be incorporated during RNA synthesis or enzymatically engineered after RNA transcription.

[0114] In certain embodiments, an RNA replicon of the application comprises, ordered from the 5′- to 3′-end, (1) an alphavirus 5′ untranslated region (5′-UTR), (2) a 5′ replication sequence of an alphavirus non-structural gene nsp1, (3) a downstream loop (DLP) motif of a virus species, (4) a polynucleotide sequence encoding an autoprotease peptide, (5) a polynucleotide sequence encoding alphavirus non-structural proteins nsp1, nsp2, nsp3 and nsp4, (6) an alphavirus subgenomic promoter, (7) the polynucleotide sequence encoding the recombinant pre-fusion SARS CoV-2 S protein or the fragment or variant thereof, (8) an alphavirus 3′ untranslated region (3′ UTR), and (9) optionally, a poly adenosine sequence. A schematic illustration of a self-amplifying RNA replicon is shown in FIG. 7.

[0115] In certain embodiments, a self-replicating RNA vector of the application comprises a downstream loop (DLP) motif of a virus species. As used herein, a “downstream loop” or “DLP motif” refers to a polynucleotide sequence comprising at least one RNA stem-loop, which when placed downstream of a start codon of an open reading frame (ORF) provides increased translation of the ORF compared to an otherwise identical construct without the DLP motif. As an example, members of the Alphavirus genus can resist the activation of antiviral RNA-activated protein kinase (PKR) by means of a prominent RNA structure present within in viral 26S transcripts, which allows an eIF2-independent translation initiation of these mRNAs. This structure, called the downstream loop (DLP), is located downstream from the AUG in SINV 26S mRNA. The DLP is also detected in Semliki Forest virus (SFV). Similar DLP structures have been reported to be present in at least 14 other members of the Alphavirus genus including New World (for example, MAYV, UNAV, EEEV (NA), EEEV (SA), AURAV) and Old World (SV, SFV, BEBV, RRV, SAG, GETV, MIDV, CHIKV, and ONNV) members. The predicted structures of these Alphavirus 26S mRNAs were constructed based on SHAPE (selective 2′-hydroxyl acylation and primer extension) data (Toribio et al., Nucleic Acids Res. May 19; 44(9):4368-80, 2016), the content of which is hereby incorporated by reference). Stable stem-loop structures were detected in all cases except for CHIKV and ONNV, whereas MAYV and EEEV showed DLPs of lower stability (Toribio et al., 2016 supra). In the case of Sindbis virus, the DLP motif is found in the first 150 nt of the Sindbis subgenomic RNA. The hairpin is located downstream of the Sindbis capsid AUG initiation codon (AUG is collated at nt 50 of the Sindbis subgenomic RNA). Previous studies of sequence comparisons and structural RNA analysis revealed the evolutionary conservation of DLP in SINV and predicted the existence of equivalent DLP structures in many members of the Alphavirus genus (see e.g., Ventoso, J. Virol. 9484-9494, Vol. 86, September 2012). Examples of a self-replicating RNA vector comprising a DLP motif are described in US Patent Application Publication US2018/0171340 and the International Patent Application Publication WO2018106615, the content of which is incorporated herein by reference in its entirety. In some embodiments, a replicon RNA of the application comprises a DLP motif exhibiting at least 90%, at least 95%, at least 96%, at least 97%, at least 98%, at least 99%, or 100% sequence identity to the sequences set forth in SEQ ID NO: 200.

[0116] In one embodiment, the self-replicating RNA molecule also contains a coding sequence for an autoprotease peptide operably linked downstream of the DLP motif and upstream of the coding sequences of the nonstructural proteins (e.g., one or more of nsp1-4) or gene of interest (e.g., a pre-fusion SARS CoV-2 S protein or the fragment thereof described herein). Examples of the autoprotease peptide include, but are not limited to, a peptide sequence selected from the group consisting of porcine teschovirus-1 2A (P2A), a foot-and-mouth disease virus (FMDV) 2A (F2A), an Equine Rhinitis A Virus (ERAV) 2A (E2A), a Thosea asigna virus 2A (T2A), a cytoplasmic polyhedrosis virus 2A (BmCPV2A), a Flacherie Virus 2A (BmIFV2A), and a combination thereof. In some embodiments, a replicon RNA of the application comprises a coding sequence for P2A having the amino acid sequence of SEQ ID NO: 202. Preferably, the coding sequence exhibits at least 90%, at least 95%, at least 96%, at least 97%, at least 98%, at least 99%, or 100% sequence identity to the sequences set forth in SEQ ID NO: 201.

[0117] Any of the replicons of the invention can also comprise a 5′ and a 3′ untranslated region (UTR). The UTRs can be wild type New World or Old World alphavirus UTR sequences, or a sequence derived from any of them. In various embodiments the 5′ UTR can be of any suitable length, such as about 60 nt or 50-70 nt or 40-80 nt. In some embodiments the 5′ UTR can also have conserved primary or secondary structures (e.g., one or more stem-loop(s)) and can participate in the replication of alphavirus or of replicon RNA. In some embodiments the 3′ UTR can be up to several hundred nucleotides, for example it can be 50-900 or 100-900 or 50-800 or 100-700 or 200-700 nt. The ‘3 UTR also can have secondary structures, e.g., a step loop, and can be followed by a polyadenylate tract or poly-A tail. In any of the embodiments of the invention the 5’ and 3′ untranslated regions can be operably linked to any of the other sequences encoded by the replicon. The UTRs can be operably linked to a promoter and/or sequence encoding a heterologous protein or peptide by providing sequences and spacing necessary for recognition and transcription of the other encoded sequences. Any polyadenylation signal known to those skilled in the art in view of the present disclosure can be used. For example, the polyadenylation signal can be a SV40 polyadenylation signal, LTR polyadenylation signal, bovine growth hormone (bGH) polyadenylation signal, human growth hormone (hGH) polyadenylation signal, or human β-globin polyadenylation signal.

[0118] In another embodiment, a self-replicating RNA replicon of the application comprises a modified 5′ untranslated region (5′-UTR), preferably the RNA replicon is devoid of at least a portion of a nucleic acid sequence encoding viral structural proteins. For example, the modified 5′-UTR can comprise one or more nucleotide substitutions at position 1, 2, 4, or a combination thereof. Preferably, the modified 5′-UTR comprises a nucleotide substitution at position 2, more preferably, the modified 5′-UTR has a U->G or U->A substitution at position 2. Examples of such self-replicating RNA molecules are described in US Patent Application Publication US2018/0104359 and the International Patent Application Publication WO2018075235, the content of which is incorporated herein by reference in its entirety. In some embodiments, a replicon RNA of the application comprises a 5′-UTR exhibiting at least 90%, at least 95%, at least 96%, at least 97%, at least 98%, at least 99%, or 100% sequence identity to the sequences set forth in SEQ ID NO: 198.

[0119] In some embodiments, an RNA replicon of the application comprises a polynucleotide sequence encoding a signal peptide sequence. Preferably, the polynucleotide sequence encoding the signal peptide sequence is located upstream of or at the 5′-end of the polynucleotide sequence encoding the pre-fusion SARS CoV-2 S protein or the fragment thereof. Signal peptides typically direct localization of a protein, facilitate secretion of the protein from the cell in which it is produced, and/or improve antigen expression and cross-presentation to antigen-presenting cells. A signal peptide can be present at the N-terminus of a pre-fusion SARS CoV-2 S protein or fragment thereof when expressed from the replicon, but is cleaved off by signal peptidase, e.g., upon secretion from the cell. An expressed protein in which a signal peptide has been cleaved is often referred to as the “mature protein.” Any signal peptide known in the art in view of the present disclosure can be used. For example, a signal peptide can be a cystatin S signal peptide; an immunoglobulin (Ig) secretion signal, such as the Ig heavy chain gamma signal peptide SPIgG, the Ig heavy chain epsilon signal peptide SPIgE, or the short leader peptide sequence of the coronavirus. Exemplary nucleic acid sequence encoding a signal peptide is shown in SEQ ID NO: 195.

[0120] In various embodiments the RNA replicons disclosed herein can be engineered, synthetic, or recombinant RNA replicons. As non-limiting examples, an RNA replicon can be one or more of the following: 1) synthesized or modified in vitro, for example, using chemical or enzymatic techniques, for example, by use of chemical nucleic acid synthesis, or by use of enzymes for the replication, polymerization, exonucleolytic digestion, endonucleolytic digestion, ligation, reverse transcription, transcription, base modification (including, e.g., methylation), or recombination (including homologous and site-specific recombination) of nucleic acid molecules; 2) conjoined nucleotide sequences that are not conjoined in nature; 3) engineered using molecular cloning techniques such that it lacks one or more nucleotides with respect to the naturally occurring nucleotide sequence; and 4) manipulated using molecular cloning techniques such that it has one or more sequence changes or rearrangements with respect to the naturally occurring nucleotide sequence.

[0121] Any of the components or sequences of the RNA replicon can be operably linked to any other of the components or sequences. The components or sequences of the RNA replicon can be operably linked for the expression of the gene of interest in a host cell or treated organism and/or for the ability of the replicon to self-replicate. As used herein, the term “operably linked” is to be taken in its broadest reasonable context and refers to a linkage of polynucleotide elements in a functional relationship. A polynucleotide is “operably linked” when it is placed into a functional relationship with another polynucleotide. For instance, a promoter or UTR operably linked to a coding sequence is capable of effecting the transcription and expression of the coding sequence when the proper enzymes are present. The promoter need not be contiguous with the coding sequence, so long as it functions to direct the expression thereof. Thus, an operable linkage between an RNA sequence encoding a heterologous protein or peptide and a regulatory sequence (for example, a promoter or UTR) is a functional link that allows for expression of the polynucleotide of interest. Operably linked can also refer to sequences such as the sequences encoding the RdRp (e.g., nsP4), nsP1-4, the UTRs, promoters, and other sequences encoding in the RNA replicon, are linked so that they enable transcription and translation of the pre-fusion SARS CoV-2 S protein and/or replication of the replicon. The UTRs can be operably linked by providing sequences and spacing necessary for recognition and translation by a ribosome of other encoded sequences.

[0122] The immunogenicity of a pre-fusion SARS CoV-2 S protein or a fragment or variant thereof expressed by an RNA replicon can be determined by a number of assays known to persons of ordinary skill in view of the present disclosure.

[0123] Another general aspect of the application relates to a nucleic acid comprising a DNA sequence encoding an RNA replicon of the application. The nucleic acid can be, for example, a DNA plasmid or a fragment of a linearized DNA plasmid. Preferably, the nucleic acid further comprises a promoter, such as a T7 promoter, operably linked to the 5′-end of the DNA sequence. More preferably, the T7 promoter comprises the nucleotide sequence of SEQ ID NO: 207. The nucleic acid can be used for the production of an RNA replicon of the application using a method known in the art in view of the present disclosure. For example, an RNA replicon can be obtained by in vivo or in vitro transcription of the nucleic acid.

[0124] Host cells comprising a RNA replicon or a nucleic acid encoding the RNA replicon of the application also form part of the invention. The pre-fusion SARS CoV-2 S proteins or fragments or variants thereof may be produced through recombinant DNA technology involving expression of the molecules in host cells, e.g., Chinese hamster ovary (CHO) cells, tumor cell lines, BHK cells, human cell lines such as HEK293 cells, PER.C6 cells, or yeast, fungi, insect cells, and the like, or transgenic animals or plants. In certain embodiments, the cells are from a multicellular organism, in certain embodiments they are of vertebrate or invertebrate origin. In certain embodiments, the cells are mammalian cells, such as human cells, or insect cells. In general, the production of a recombinant proteins, such the pre-fusion SARS CoV-2 S proteins or fragments or variants thereof of the invention, in a host cell comprises the introduction of a heterologous nucleic acid molecule encoding the protein in expressible format into the host cell, culturing the cells under conditions conducive to expression of the nucleic acid molecule and allowing expression of the protein or fragment or variant thereof in said cell. The nucleic acid molecule encoding a protein in expressible format may be in the form of an expression cassette, and usually requires sequences capable of bringing about expression of the nucleic acid, such as enhancer(s), promoter, polyadenylation signal, and the like. The person skilled in the art is aware that various promoters can be used to obtain expression of a gene in host cells. Promoters can be constitutive or regulated, and can be obtained from various sources, including viruses, prokaryotic, or eukaryotic sources, or artificially designed.

[0125] Cell culture media are available from various vendors, and a suitable medium can be routinely chosen for a host cell to express the protein of interest, here the pre-fusion SARS CoV-2 S proteins. The suitable medium may or may not contain serum.

[0126] A “heterologous nucleic acid molecule” (also referred to herein as ‘transgene’) is a nucleic acid molecule that is not naturally present in the host cell. It is introduced into, for instance, a vector by standard molecular biology techniques. A transgene is generally operably linked to expression control sequences. This can, for instance, be done by placing the nucleic acid encoding the transgene(s) under the control of a promoter. Further regulatory sequences may be added. Many promoters can be used for expression of a transgene(s), and are known to the skilled person, e.g., these may comprise viral, mammalian, synthetic promoters, and the like. A non-limiting example of a suitable promoter for obtaining expression in eukaryotic cells is a CMV-promoter (U.S. Pat. No. 5,385,839), e.g., the CMV immediate early promoter, for instance comprising nt. −735 to +95 from the CMV immediate early gene enhancer/promoter. A polyadenylation signal, for example the bovine growth hormone polyA signal (U.S. Pat. No. 5,122,458), may be present behind the transgene(s). Alternatively, several widely used expression vectors are available in the art and from commercial sources, e.g., the pcDNA and pEF vector series of Invitrogen, pMSCV and pTK-Hyg from BD Sciences, pCMV-Script from Stratagene, etc., which can be used to recombinantly express the protein of interest, or to obtain suitable promoters and/or transcription terminator sequences, polyA sequences, and the like.

[0127] The cell culture can be any type of cell culture, including adherent cell culture, e.g., cells attached to the surface of a culture vessel or to microcarriers, as well as suspension culture. Most large-scale suspension cultures are operated as batch or fed-batch processes because they are the most straightforward to operate and scale up. Nowadays, continuous processes based on perfusion principles are becoming more common and are also suitable. Suitable culture media are also well known to the skilled person and can generally be obtained from commercial sources in large quantities, or custom-made according to standard protocols. Culturing can be done for instance in dishes, roller bottles or in bioreactors, using batch, fed-batch, continuous systems and the like. Suitable conditions for culturing cells are known (see, e.g., Tissue Culture, Academic Press, Kruse and Paterson, editors (1973), and R.I. Freshney, Culture of animal cells: A manual of basic technique, fourth edition (Wiley-Liss Inc., 2000, ISBN 0-471-34889-9)).

[0128] The invention further provides compositions comprising a pre-fusion SARS CoV-2 S protein or fragment or variant thereof and/or a nucleic acid molecule, and/or a vector, as described above. The invention also provides compositions comprising a nucleic acid molecule and/or a vector, encoding such pre-fusion SARS CoV-2 S protein or fragment or variant thereof. The invention further provides immunogenic compositions comprising a pre-fusion SARS CoV-2 S protein or fragment or variant thereof, and/or a nucleic acid molecule, and/or a vector, as described above. The invention also provides the use of a stabilized pre-fusion SARS CoV-2 S protein or fragment or variant thereof, a nucleic acid molecule, and/or a vector, according to the invention, for inducing an immune response against a SARS CoV-2 S protein or fragment or variant thereof in a subject. Further provided are methods for inducing an immune response against SARS CoV-2 S protein or fragment or variant thereof in a subject, comprising administering to the subject a pre-fusion SARS CoV-2 S protein or fragment or variant thereof, and/or a nucleic acid molecule, and/or a vector according to the invention. Also provided are pre-fusion SARS CoV-2 S proteins or fragments or variants thereof, nucleic acid molecules, and/or vectors, according to the invention for use in inducing an immune response against SARS CoV-2 S protein or fragment or variant thereof in a subject. Further provided is the use of the pre-fusion SARS CoV-2 S proteins or fragments or variants thereof, and/or nucleic acid molecules, and/or vectors according to the invention for the manufacture of a medicament for use in inducing an immune response against SARS CoV-2 S protein or fragment or variant thereof in a subject. In certain embodiments, the nucleic acid molecule is DNA and/or an RNA molecule.

[0129] The pre-fusion SARS CoV-2 S proteins or fragments or variants thereof, nucleic acid molecules, or vectors of the invention may be used for prevention (prophylaxis, including post-exposure prophylaxis) of SARS CoV-2 infections. In certain embodiments, the prevention may be targeted at patient groups that are susceptible for and/or at risk of SARS CoV-2 infection or have been diagnosed with a SARS CoV-2 infection. Such target groups include, but are not limited to, e.g., the elderly (e.g., >50 years old, >60 years old, and preferably >65 years old), hospitalized patients, and patients who have been treated with an antiviral compound but have shown an inadequate antiviral response. In certain embodiments, the target population comprises human subjects from 2 months of age.

[0130] The pre-fusion SARS CoV-2 S proteins or fragments or variants thereof, nucleic acid molecules, and/or vectors according to the invention can be used, e.g., in stand-alone treatment and/or prophylaxis of a disease or condition caused by SARS CoV-2, or in combination with other prophylactic and/or therapeutic treatments, such as (existing or future) vaccines, antiviral agents, and/or monoclonal antibodies.

[0131] The invention further provides methods for preventing and/or treating SARS CoV-2 infection in a subject utilizing the pre-fusion SARS CoV-2 S proteins or fragments or variants thereof, nucleic acid molecules, and/or vectors according to the invention. In a specific embodiment, a method for preventing and/or treating SARS CoV-2 infection in a subject comprises administering to a subject in need thereof an effective amount of a pre-fusion SARS CoV-2 S protein or fragment or variant thereof, nucleic acid molecule, and/or a vector, as described above. A therapeutically effective amount refers to an amount of a protein, nucleic acid molecule, or vector, which is effective for preventing, ameliorating and/or treating a disease or condition resulting from infection by SARS CoV-2. Prevention encompasses inhibiting or reducing the spread of SARS CoV-2 or inhibiting or reducing the onset, development, or progression of one or more of the symptoms associated with infection by SARS CoV-2. Amelioration, as used in herein, can refer to the reduction of visible or perceptible disease symptoms, viremia, or any other measurable manifestation of SARS CoV-2 infection.

[0132] For administering to subjects, such as humans, the invention can employ pharmaceutical compositions comprising a pre-fusion SARS CoV-2 S protein or fragment or variant thereof, a nucleic acid molecule and/or a vector as described herein, and a pharmaceutically acceptable carrier or excipient. In the present context, the term “pharmaceutically acceptable” means that the carrier or excipient, at the dosages and concentrations employed, will not cause any unwanted or harmful effects in the subjects to which they are administered. Such pharmaceutically acceptable carriers and excipients are well known in the art (see Remington's Pharmaceutical Sciences, 18th edition, A. R. Gennaro, Ed., Mack Publishing Company [1990]; Pharmaceutical Formulation Development of Peptides and Proteins, S. Frokjaer and L. Hovgaard, Eds., Taylor & Francis [2000]; and Handbook of Pharmaceutical Excipients, 3rd edition, A. Kibbe, Ed., Pharmaceutical Press [2000]). The CoV S proteins, or nucleic acid molecules, preferably are formulated and administered as a sterile solution although it can also be possible to utilize lyophilized preparations. Sterile solutions are prepared by sterile filtration or by other methods known per se in the art. The solutions are then lyophilized or filled into pharmaceutical dosage containers. The pH of the solution generally is in the range of pH 3.0 to 9.5, e.g., pH 5.0 to 7.5. The CoV S proteins typically are in a solution having a suitable pharmaceutically acceptable buffer, and the composition can also contain a salt. Optionally, a stabilizing agent can be present, such as albumin. In certain embodiments, detergent is added. In certain embodiments, the CoV S proteins can be formulated into an injectable preparation.

[0133] An RNA replicon can be formulated using any suitable pharmaceutically acceptable carriers in view of the present disclosure. For example, an RNA replicon of the application can be formulated in an immunogenic composition that comprises one or more lipid molecules, preferably positively charged lipid molecules.

[0134] In some embodiments, an RNA replicon of the disclosure can be formulated using one or more liposomes, lipoplexes, and/or lipid nanoparticles. In some embodiments, liposome or lipid nanoparticle formulations described herein can comprise a polycationic composition. In some embodiments, the formulations comprising a polycationic composition can be used for the delivery of the RNA replicon described herein in vivo and/or ex vitro.

[0135] Compositions and therapeutic combinations of the application can be administered to a subject by any method known in the art in view of the present disclosure, including, but not limited to, parenteral administration (e.g., intramuscular, subcutaneous, intravenous, or intradermal injection), oral administration, transdermal administration, and nasal administration. Preferably, compositions and therapeutic combinations are administered parenterally (e.g., by intramuscular injection or intradermal injection). Methods of delivery are not limited to the above described embodiments, and any means for intracellular delivery can be used.

[0136] In certain embodiments, a composition according to the invention further comprises one or more adjuvants. Adjuvants are known in the art to further increase the immune response to an applied antigenic determinant. The terms “adjuvant” and “immune stimulant” are used interchangeably herein and are defined as one or more substances that cause stimulation of the immune system. In this context, an adjuvant is used to enhance an immune response to the SARS CoV-2 S proteins of the invention. Examples of suitable adjuvants include aluminum salts such as aluminum hydroxide and/or aluminum phosphate; oil-emulsion compositions (or oil-in-water compositions), including squalene-water emulsions, such as MF59 (see, e.g., WO 90/14837); saponin formulations, such as for example QS21 and Immunostimulating Complexes (ISCOMS) (see, e.g., U.S. Pat. No. 5,057,540; WO 90/03184, WO 96/11711, WO 2004/004762, WO 2005/002620); bacterial or microbial derivatives, examples of which are monophosphoryl lipid A (MPL), 3-O-deacylated MPL (3dMPL), CpG-motif containing oligonucleotides, ADP-ribosylating bacterial toxins or mutants thereof, such as E. coli heat labile enterotoxin LT, cholera toxin CT, and the like; eukaryotic proteins (e.g. antibodies or fragments thereof (e.g., directed against the antigen itself or CD1a, CD3, CD7, CD80) and ligands to receptors (e.g., CD40L, GMCSF, GCSF, etc), which stimulate immune response upon interaction with recipient cells. In certain embodiments the compositions of the invention comprise aluminum as an adjuvant, e.g., in the form of aluminum hydroxide, aluminum phosphate, aluminum potassium phosphate, or combinations thereof, in concentrations of 0.05-5 mg, e.g., from 0.075-1.0 mg, of aluminum content per dose.

[0137] The pre-fusion SARS CoV-2 S proteins or fragments or variants thereof can also be administered in combination with or conjugated to nanoparticles, such as, e.g., polymers, liposomes, virosomes, virus-like particles. The SARS CoV-2 S proteins or fragments or variants thereof can be combined with or encapsulated in or conjugated to the nanoparticles with or without adjuvant. Encapsulation within liposomes is described, e.g., in U.S. Pat. No. 4,235,877. Conjugation to macromolecules is disclosed, for example, in U.S. Pat. Nos. 4,372,945 or 4,474,757.

[0138] In other embodiments, the compositions do not comprise adjuvants.

[0139] In certain embodiments, the invention provides methods for making a vaccine against a SARS CoV-2 virus, comprising providing a composition according to the invention and formulating it into a pharmaceutically acceptable composition. The term “vaccine” refers to an agent or composition containing an active component effective to induce a certain degree of immunity in a subject against a certain pathogen or disease, which will result in at least a decrease (up to complete absence) of the severity, duration or other manifestation of symptoms associated with infection by the pathogen or the disease. In the present invention, the vaccine comprises an effective amount of a pre-fusion SARS CoV-2 S protein or fragment or variant thereof and/or a nucleic acid molecule encoding a pre-fusion SARS CoV-2 S protein or fragment or variant thereof, and/or a vector comprising said nucleic acid molecule, which results in an immune response against the S protein of SARS CoV-2. This provides a method of preventing serious lower respiratory tract disease leading to hospitalization and the decrease in frequency of complications such as pneumonia and bronchiolitis due to SARS CoV-2 infection and replication in a subject. The term “vaccine” according to the invention implies that it is a pharmaceutical composition, and thus typically includes a pharmaceutically acceptable diluent, carrier or excipient. It can or cannot comprise further active ingredients. In certain embodiments it can be a combination vaccine that further comprises additional components that induce an immune response against SARS CoV-2, e.g., against other antigenic proteins of SARS CoV-2, or can comprise different forms of the same antigenic component. A combination product can also comprise immunogenic components against other infectious agents, e.g., other respiratory viruses including but not limited to influenza virus or RSV. The administration of the additional active components can, for instance, be done by separate, e.g., concurrent administration, or in a prime-boost setting, or by administering combination products of the vaccines of the invention and the additional active components.

[0140] Compositions can be administered to a subject, e.g., a human subject. The total dose of the SARS CoV-2 S proteins in a composition for a single administration can, for instance, be about 0.01 μg to about 10 mg, e.g., 1 μg-1 mg, e.g., 10 μg-100 μg. Determining the recommended dose will be carried out by experimentation and is routine for those skilled in the art.

[0141] Administration of the compositions according to the invention can be performed using standard routes of administration. Non-limiting embodiments include parenteral administration, such as intradermal, intramuscular, subcutaneous, transcutaneous, or mucosal administration, e.g., intranasal, oral, and the like. In one embodiment a composition is administered by intramuscular injection. The skilled person knows the various possibilities to administer a composition, e.g., a vaccine in order to induce an immune response to the antigen(s) in the vaccine.

[0142] A subject as used herein preferably is a mammal, for instance a rodent, e.g., a mouse, a cotton rat, or a non-human-primate, or a human. Preferably, the subject is a human subject.

[0143] A SARS CoV-2 S protein, a nucleic acid molecule, a vector (such as an RNA replicon) or a composition according to an embodiment of the application can be used to induce an immune response in a mammal against SARS CoV-2 virus. The immune response can include a humoral (antibody) response and/or a cell mediated response, such as a T cell response, against SARS CoV-2 virus in a human subject.

[0144] The proteins, nucleic acid molecules, vectors, and/or compositions can also be administered, either as prime, or as boost, in a homologous or heterologous prime-boost regimen. If a boosting vaccination is performed, typically, such a boosting vaccination will be administered to the same subject at a time between one week and one year, preferably between two weeks and four months, after administering the composition to the subject for the first time (which is in such cases referred to as ‘priming vaccination’). In certain embodiments, the boosting composition or vaccine is administered at least 2 weeks after the priming composition or vaccine. In certain embodiments, the boosting composition or vaccine is administered about 2 weeks to about 12 weeks after the priming composition or vaccine. In certain embodiments, the boosting composition or vaccine is administered about 4 weeks after the priming composition or vaccine. In certain embodiments, the administration comprises at least one prime and at least one booster administration.

[0145] The prime-boost administration can, for example, be a homologous prime-boost, wherein the first and second dose comprise the same antigen (e.g., the SARS-CoV-2 spike protein) expressed from the same vector (e.g., an RNA replicon). The prime-boost administration can, for example, be a heterologous prime-boost, wherein the first and second dose comprise the same antigen or a variant thereof (e.g., the SARS-CoV-2 spike protein) expressed from the same or different vector (e.g., an RNA replicon, an adenovirus, an mRNA, or a plasmid). In some embodiments of a heterologous prime-boost administration, the first dose comprises an adenovirus vector comprising the SARS-CoV-2 spike protein or a variant thereof and a second dose comprising an RNA replicon vector comprising the SARS-CoV-2 spike protein or a variant thereof. In some embodiments of a heterologous prime-boost administration, the first dose comprises an RNA replicon vector comprising the SARS-CoV-2 spike protein or a variant thereof and a second dose comprising an adenovirus vector comprising the SARS-CoV-2 spike protein or a variant thereof.

[0146] In certain aspects, the RNA replicon vaccine used in a homologous prime-boost or a heterologous prime-boost administration comprises an amino acid sequence selected from the group consisting of SEQ ID NOs:1-3 and 5-194 or a fragment or variant thereof. In certain embodiments, the first dose comprises an adenovirus vector comprising an amino acid sequence selected from the group consisting of SEQ ID NOs:1-3 and 5-194 or a fragment or variant thereof and a second dose comprising an RNA replicon vector comprising an amino acid sequence selected from the group consisting of SEQ ID NOs:1-3 and 5-194 or a fragment or variant thereof. In certain embodiments, the first dose comprises an RNA replicon vector comprising an amino acid sequence selected from the group consisting of SEQ ID NOs:1-3 and 5-194 or a fragment or variant thereof and a second dose comprising an adenovirus vector comprising an amino acid sequence selected from the group consisting of SEQ ID NOs:1-3 and 5-194 or a fragment or variant thereof.

[0147] The SARS CoV-2 S proteins can also be used to isolate monoclonal antibodies from a biological sample, e.g., a biological sample (such as blood, plasma, or cells) obtained from an immunized animal or infected human. The invention, thus, also relates to the use of the SARS CoV-2 protein as bait for isolating monoclonal antibodies.

[0148] Also provided is the use of the pre-fusion SARS CoV-2 S proteins of the invention in methods of screening for candidate SARS CoV-2 antiviral agents, including, but not limited to, antibodies against SARS CoV-2

[0149] In addition, the proteins of the invention can be used as diagnostic tool, for example to test the immune status of an individual by establishing whether there are antibodies in the serum of such individual capable of binding to the protein of the invention. The invention, thus, also relates to an in vitro diagnostic method for detecting the presence of an ongoing or past CoV infection in a subject said method comprising the steps of a) contacting a biological sample obtained from said subject with a protein according to the invention; and b) detecting the presence of antibody-protein complexes.

[0150] The invention is further explained in the following examples. The examples do not limit the invention in any way. They merely serve to clarify the invention.

### EXAMPLES

### Example 1: Instability of Semi-Stabilized SARS-CoV2 S Protein

[0151] A plasmid corresponding to the semi-stabilized SARS-CoV2 S protein described by (Wrapp et. al., Science 2020, FurinKO+PP according to SEQ ID NO: 3) was synthesized and codon-optimized at Gene Art (Life Technologies, Carlsbad, Calif.). A variant with a HIS tag (based on SEQ ID NO: 3) and a variant with a C-tag were purified. The constructs were cloned into pCDNA2004 or generated by standard methods widely known within the field involving site-directed mutagenesis and PCR and sequenced. Expi293F cells were used as the expression platform. The cells were transiently transfected using ExpiFectamine (Life Technologies; Carlsbad, Calif.) according to the manufacturer's instructions and cultured for 6 days at 37° C. and 10% CO₂. The culture supernatant was harvested and spun for 5 minutes at 300 g to remove cells and cellular debris. The spun supernatant was subsequently sterile filtered using a 0.22 um vacuum filter and stored at 4° C. until use.

[0152] SARS-CoV2 S trimers were purified using a two-step purification protocol including either CaptureSelect C-tag affinity column for C-tagged protein, or, for HIS-tagged protein, by Complete His-tag 5 mL (Roche; Basel, Switzerland). Both proteins were further purified by size-exclusion chromatography using a HiLoad Superdex 200 16/600 column (GE Healthcare). The C-tagged and HIS tagged S trimer was unstable after repeated freeze/thaw cycles (FIGS. 2A and 2B). The purified HIS-tagged S trimer and the C-tagged trimer showed decay after 1 and especially after 5 flash freezing cycles using liquid Nitrogen (FIGS. 2A and 2B).

### Example 2: Stabilizing Mutations Analyzed with AlphaLISA and Analytical SEC

[0153] In order to stabilize the labile pre-fusion conformation of SARS-CoV2 S protein, amino acid residues at position 614, 892, and 942 (numbering according to the SEQ ID NO: 1) were mutated. Plasmids coding for the recombinant SARS-CoV-2 S protein ectodomains, which were C-terminally fused to a foldon (SEQ ID NO: 4) were expressed in Expi293Fcells, and 3 days after transfection, the supernatants were tested for binding to ACE2-Fc using AlphaLISA (FIG. 3).

[0154] For the AlphaLISA assay, SARS-CoV2 S variants in the pcDNA2004 vector containing a linker followed by a sortase A tag, followed by a Flag-tag, followed by a flexible (G₄S)₇ linker, and ending with a His-tag, were prepared (the sequence of the tag, which was placed at the C-terminus of the S protein, is provided in SEQ ID NO: 2). Three days after transfection, crude supernatants were diluted 300 times in AlphaLISA buffer (PBS+0.05% Tween-20+0.5 mg/mL BSA). Then, 10 μL of each dilution were transferred to a 96-well plate and mixed with 40 μL acceptor beads, donor beads, and ACE2-Fc. The donor beads were conjugated to ProtA (Cat #: AS102M, Perkin Elmer; Waltham, Mass.), which binds to ACE2Fc. The acceptor beads were conjugated to an anti-His antibody (Cat #: AL128M, Perkin Elmer), which binds to the His-tag of the construct.

[0155] The mixture of the supernatant containing the expressed S protein, the ACE-2-Fc, donor beads, and acceptor beads was incubated at room temperature for 2 hours without shaking. Subsequently, the chemiluminescent signal was measured with an Ensight plate reader instrument (Perkin Elmer). The average background signal attributed to mock transfected cells was subtracted from the AlphaLISA counts measured for each of the SARS-CoV-2 S variants. Subsequently, the whole data set was divided by signal measured for the SARS CoV-2 S protein having the S backbone sequence signal to normalize the signal for each of the S variants tested to the backbone.

[0156] Compared with the soluble uncleaved S variant with a C-terminal foldon domain (SEQ ID NO: 2) or the variant with the additional PP (SEQ ID NO:3), the S variants with stabilizing substitutions D614N, A892P, and A942P showed higher ACE2-Fc binding (FIG. 3).

[0157] The cell culture supernatants of transfections with a semi-stable uncleaved SARS-CoV-2 S+PP design and with a labile uncleaved SARS-CoV-2 S protein, and of variants with a single point mutation as described above (D614N, A892P, and A942P) were analyzed using analytical SEC (FIGS. 4A-4G). An ultra high-performance liquid chromatography system (Vanquish, Thermo Scientific; Waltham, Mass.) and μDAWN TREOS instrument (Wyatt; Santa Barbara, Calif.) coupled to an Optilab μT-rEX Refractive Index Detector (Wyatt), in combination with an in-line Nanostar DLS reader (Wyatt), was used for performing the analytical SEC experiment. The cleared crude cell culture supernatants were applied to a SRT-10C SEC-500 15 cm column, (Sepax Cat #235500-4615) with the corresponding guard column (Sepax; Newark, Del.) equilibrated in running buffer (150 mM sodium phosphate, 50 mM NaCl, pH 7.0) at 0.35 mL/min. When analyzing supernatant samples, μMALS detectors were offline and analytical SEC data was analyzed using Chromeleon 7.2.8.0 software package. The signal of supernatants of non-transfected cells was subtracted from the signal of supernatants of S transfected cells. When purified proteins were analyzed using SEC-MALS, mMALS detectors were inline and data was analyzed using Astra 7.3 software package. For the protein component, a dn/dc (mL/g) value of 0.1850 was used and for the glycan component a value of 0.1410. Compared with the semi-stable soluble uncleaved S variant with a C-terminal foldon domain +PP, the variants with additional stabilizing substitutions D614N, A892P, and especially A942P showed higher trimer content according to analytical SEC of culture supernatant (FIGS. 4 A-C). Similarly, compared with the soluble uncleaved S variant with a C-terminal foldon domain, variants with stabilizing substitutions D614N, A892P, and especially A942P showed higher trimer content according to analytical SEC of culture supernatant. The A942P mutation has a stronger stabilizing effect than the published double proline mutation in the hinge loop (compare dashed line of FIG. 4B with solid line of FIG. 4 E). SEC-MALS analysis was performed on the purified stabilized protein according to SEQ ID NO: 5 and showed that the peak at 5 minutes corresponds to the mass of a trimeic S protein (FIG. 4G).

### Example 3: Stabilizing Point Mutations and Disulfide Bridges Analyzed with AlphaLISA and Analytical SEC

[0158] In order to stabilize the labile pre-fusion conformation of SARS-CoV-2 S protein, disulfide bridges were introduced between residues 880 and 888 or between residues 884 and 893, and point mutations were introduced at position 532 and 572. Similar to EXAMPLE 2, plasmids coding for the uncleaved SARS-CoV-2 S protein with or without the double proline in the hinge loop were expressed in Expi293Fcells, and 3 days after transfection the supernatants were tested for binding to ACE2-Fc using AlphaLISA as described in EXAMPLE 2 (FIG. 5).

[0159] Compared with the soluble labile uncleaved S variant with a C-terminal foldon, the variants with stabilizing substitutions T5721, N532P, and with the introduction of a disulfide between residues 880 and 888 showed higher ACE2-Fc binding (FIG. 5, left panel).

[0160] In addition, compared with the soluble semi stable uncleaved S variant with a C-terminal foldon domain and the double proline, the variants with stabilizing substitutions T5721, N532P, with the introduction of a disulfide between residues 880 and 888 and with a disulfide between residues 884 and 893 showed higher ACE2-Fc binding (FIG. 5, right panel).

[0161] The cell culture supernatants of transfections with a semi stable uncleaved SARS-CoV-2 S+PP design and with a labile uncleaved SARS-CoV-2 S protein, and of variants with an introduced disulfide bridge or a single point mutation as described above (T5721, N532P, CYS880-CYS888 and CYS884-CYS893) were analyzed using analytical SEC (FIG. 6) as described in EXAMPLE 2. Compared with the semi-stable soluble uncleaved S variant with a C-terminal foldon domain+PP, the variants with stabilizing substitutions T5721, N532P, and the disulfide bridges 880C-888C and 884C-893C (FIGS. 6A-6D) showed higher trimer content according to analytical SEC of culture supernatant. Similarly, compared with the soluble uncleaved S variant, the variants with stabilizing substitutions T5721, N532P, and the variant with disulfide bridge 880C-888C showed higher trimer content according to analytical SEC of culture supernatant (FIGS. 6E-6H).

TABLE 1
Standard amino acids, abbreviations and properties

| | | | Side chain | Side chain |
|---|---|---|---|---|
| Amino Acid | 3-Letter | 1-Letter | polarity | charge (pH 7.4) |
| Alanine | Ala | A | non-polar | Neutral |
| Arginine | Arg | R | Polar | Positive |
| asparagine | Asn | N | Polar | Neutral |
| aspartic acid | Asp | D | polar | Negative |
| Cysteine | Cys | C | non-polar | Neutral |
| glutamic acid | Glu | E | polar | Negative |
| glutamine | Gln | Q | polar | Neutral |
| Glycine | Gly | G | non-polar | Neutral |
| Histidine | His | H | polar | positive (10%) |
| | | | | neutral (90%) |
| isoleucine | Ile | I | non-polar | Neutral |
| Leucine | Leu | L | non-polar | Neutral |
| Lysine | Lys | K | polar | Positive |
| methionine | Met | M | non-polar | Neutral |
| phenylalanine | Phe | F | non-polar | Neutral |
| proline | Pro | P | non-polar | Neutral |
| serine | Ser | S | polar | Neutral |
| threonine | Thr | T | polar | Neutral |
| tryptophan | Trp | W | non-polar | Neutral |
| tyrosine | Tyr | Y | polar | Neutral |
| valine | Val | V | non-polar | Neutral |

### Example 4: Construction and Characterization of RNA Replicon Expressing SARS-CoV-2 S Variants

### Plasmid Construction

[0162] The TC-83 strain of Venezuelan Equine Encephalitis Virus (VEEV) genome sequence serves as the base sequence used to construct the SMARRT replicon. This sequence is modified by placing the Downstream LooP (DLP) from Sindbis virus upstream of the non-structural protein 1 (nsP1) with the two joined by a 2A ribosome skipping element from porcine teschovirus-1. The first 213 nucleotides of nsP1 are duplicated downstream of the 5′ UTR and upstream of the DLP except for the start codon, which is mutated to TAG. This insures that all regulatory and secondary structures necessary for replication are maintained but prevents translation of this partial nsp1 sequence. The alphavirus structural genes are removed and EcoR V and Asc I restriction sites are placed downstream of the subgenomic promoter as a multiple cloning site (MCS) to facilitate insertion of heterologous genes of interest. 40 bp of homology to the MCS is added to the 5′ and 3′ ends of each CoV2 spike antigen sequence and is cloned into the SMARRT replicon digested with EcoRV and AscI using NEB HiFi DNA assembly master mix (cat #E2621S). All constructs are sequenced verified.

### RNA Transcription

[0163] Plasmids are purified using the Nucleobond xtra EF maxiprep kits (Machery-Nagel cat #740426.10) followed by phenol/chloroform extraction and Sodium Acetate/ethanol precipitation. RNA is generated using the HiS cribe T7 ARCA mRNA kit from NEB (cat #E2065S) and 1 μg of plasmid template linearized with NdeI. RNA is subsequently purified using RNeasy purification columns (Qiagen cat #75144; Qiagen; Hilden, Germany) and is eluted in water. RNA concentration is determined using a Nanodrop spectrophotometer.

Detection of dsRNA and Spike Antigen

[0164] Vero cells (ATCC, Manassas, Va., CCL-81) are cultured in DMEM supplemented with 10% fetal bovine serum (Gemini #100-106) and penicillin/streptomycin/glutamine (Gibco #10378016). The cells are electroporated in strip cuvettes with 1.5 μg of RNA per 10⁶ cells using SF buffer (Lonza; Basel, Switzerland) and a 4D-Nucleofector. 21 h post electroporation cells are harvested for analysis by either flow cytometry or Western blot as follows.

[0165] Flow cytometry: 21 hours post electroporation cells are incubated in Versene solution for 10 minutes to detach them from the plate and are washed twice in PBS containing 5% BSA. The cells are stained for surface expressed CoV2 spike protein using the antibody CR3022 directly conjugated to APC. After staining CoV2 spike on the cell surface, the cells are washed, then fixed, permeabilized, and stained for intracellular dsRNA using the J2 anti-dsRNA Ab (Scicons, #10010500) conjugated to R-PE using a Lightning-Link R-PE conjugation kit (Innova Biosciences; Cambridge, England). After staining, cells are evaluated on a LSRFortessa flow cytometer (BD) and the data are analyzed using FlowJo 10 (Tree Star, Ashland, Oreg.).

[0166] Western blot: To analyze cells by Western blot, cells are washed with PBS following which 150 μL of 1×LDS loading buffer plus reducing agent is added to each well of a 6 well plate. Whole cell lysates are transferred to a microfuge tube and are incubated at 70° C. for 10 minutes. 25 μL of lysate from each sample is loaded and separated on a 4-12% Bis-Tris Gel. Proteins are transferred to a nitrocellulose membrane using an iBlot system and the membranes are probed for CoV2 spike protein with an anti-CoV2 spike antibody from Genetex (Cat #GTX632604; Genetex; Irvine, Calif.). The blot is then probed for actin to ensure equal loading across the different samples.

### Example 5: Dose Response Study for Homologous Prime-Boost Administration of SMARRT-nCov Constructs

[0167] The investigate whether the SMARRT-nCov constructs were able to elicit a humoral immune response at days 27 and 56 post administration, a dose response study for a homologous prime-boost administration of SMARRT-1158 and SMARRT-1159 constructs was conducted. SMARRT-1158, comprising a SARS-CoV-2 spike full length wild type protein (YP_009724390.1), and SMARRT-1159, comprising a SARS-CoV-2 spike protein with a wild-type signal peptide, the furin cleavage site removed, and stabilizing proline mutations in the hinge loop, were administered to Balb/C mice at day 0 as a priming administration at increasing dose levels of 0.1 μg, 1.0 μg, and 10 μg. The same constructs were administered at the same doses in a boosting administration at day 28 post prime administration. A DNA encoding the same spike protein as the SMARRT-1159 construct was administered as a control at a dose of 100 μg for the priming administration and 10 μg for the boosting administration. The dose schedule and experimental design is provided below in Table 2.

TABLE 2
Dose response study design for homologous prime-boost administration

| Group | 1^{st} dose (day 0) | Dose (μg) | 2^{nd} Dose (day 28) | Dose (μg) | n^{%} |
|---|---|---|---|---|---|
| 1 | SMARRT-1158 | 0.1 | SMARRT-1158 | 0.1 | 10 |
| 2 | SMARRT-1158 | 1.0 | SMARRT-1158 | 1.0 | 10 |
| 3 | SMARRT-1158 | 10 | SMARRT-1158 | 10 | 10 |
| 4 | SMARRT-1159 | 0.1 | SMARRT-1159 | 0.1 | 10 |
| 5 | SMARRT-1159 | 1.0 | SMARRT-1159 | 1.0 | 10 |
| 6 | SMARRT-1159 | 10 | SMARRT-1159 | 10 | 10 |
| 7 | DNA-1159* | 100 | DNA-1159* | 10 | 10 |

*DNA encoding COVID-19 spike antigen (1159 construct)
^{%}n = 5/group sacrificed at day 14 and the remaining half at day 54

[0168] An ELISA assay was used to measure the spike protein specific IgG titers produced after administration of the prime and boost compositions. After administration of the prime composition, the spike protein specific IgG titers were measured at days 14 and 27, and after administration of the boost composition, the spike protein specific IgG titers were measured at days 42 and 54. As a control, the spike specific IgG titers were measured 1 day prior to the administration of the priming composition. The results are shown in FIGS. 8B-8E.

[0169] The SMARRT-1159 construct elicited higher antibody titers at days 14 and 27 compared to the SMARRT-1158 construct (FIGS. 8B and 8C). 0.1 μg of SMARRT-1159 elicited titers at similar levels to 10 μg of SMARRT-1158 (FIGS. 8B and 8C). Antibody titers elicited by SMARRT-1159 increased from day 14 to day 27 (FIGS. 8B and 8C). The DNA-1159 construct did not elicit high antibody titers (data not shown).

[0170] A second dose of the SMARRT constructs boosted the spike protein specific antibody titers when measured at 42 and 54 days (FIGS. 8C and 8D) as compared to the day 27 titers.

[0171] FIG. 9 demonstrated that the SMARRT-1159 construct was capable of producing neutralizing antibodies to the spike protein at day 27 after the administration of the priming composition.

[0172] FIGS. 10A and 10B demonstrated that similar levels of IFNγ secreting cells were detected in the spleens of immunized animals 2 weeks after the first dose at day 14 (FIG. 10A) and 2 weeks after the second dose at day 54 (FIG. 10B).

### Materials and Methods

[0173] ELISpot Assay for Mouse Splenocytes:

[0174] Plates were washed four times with 200 μl of sterile PBS in a biosafety hood. The wells of the plate were conditioned with 200 μl of AIM V® media (Gibco) with albumax for 2 hours.

[0175] While the plates are conditioned with the blocking buffer, a PMA/Ionomycin solution was prepared by adding 4 μl of PMA stock (1 mg/ml) to 1.996 ml of media to create a 1:500 dilution. 200 μl of the 1:500 dilution was added to 9.780 ml of media to create a 1:50 dilution. 20 μl of Ionomycin was added to the media to create a 1:500 dilution.

[0176] After preparing the PMA/Ionomycin solution, the blocking buffer was removed from the plates and the plates were patted dry on a paper towel. 100 μl of the PMA/Ionomycin solution, stimulations, and DMSO, were added to the wells of the plate. 100 μl of cells, diluted in AIM V®, were added to each well at a total concentration of 2.5×10⁵ cells/well. The plates were incubated at 37° C., 5% CO₂ for 22 hours.

[0177] The plates were washed five times with PBS. The 1 mg/ml detection antibody, i.e., R4-6A2 biotin) was diluted to 1 μg/ml in PBS containing 0.5% FBS. 100 μl of diluted detection antibody was added to each well and the plate was incubated for 2 hours at room temperature.

[0178] The plates were washed five times with PBS. The secondary antibody, i.e., Streptavidin-HRP, was diluted 1:1000 in PBS-0.5% FBS. 100 μl of the secondary antibody was added to each well, and the plate was incubated for 1 hour at room temperature in the dark. The plates were washed five times. The ready to use TMB substrate was filtered, and 100 μl of the TMB substrate was added to each well and developed until distinct spots emerged (˜10 minutes). The plates were sent for scanning and counting services.

[0179] Intracellular Staining of Murine Splenocytes:

[0180] AIM V® plus media with co-stimulatory molecules was prepared by taking 100 ml of AIM V® tissue culture media, and adding 100 μl of anti-CD49d and anti-CD28 purified antibodies for a final concentration of 0.5 μg/ml. AIM V® plus media was kept on ice.

[0181] A cell activation cocktail of PMA/Ionomycin positive control media (without brefeldin A) at a 1:250 ratio was made by preparing a 500× cell activation cocktail of PMA at a concentration of 40.5 μM and lonomycin at a concentration of 669.3 μM in DMSA. If doing pools of n=15 groups with 0.1 ml/group; 3 mls of diluted cell activation cocktail is prepared by adding 2.988 ml of AIM V tissue culture media with 12 μl of the 500× cell activation cocktail to produce a 1:250 dilution. 100 μl of the diluted cell activation cocktail was added to the appropriate wells of the 96 well plate.

[0182] DMSO “mock” condition media at a 1:250 dilution was prepared as follows: for 50 mice×100 μl/well; a total amount of 5 mls of mock conditioned media was needed. Add 5 mls of AIM V® plus media (with co-stimulatory molecules) to 20 μl of DMSO and mix well. Add 100 μl of mock media to the appropriate wells of the 96 well plate.

[0183] SARS-CoV-2 spike-specific overlapping peptide pools were prepared and labeled. For 150 samples×100 μl/well, prepare enough SAR-CoV-2 spike-specific overlapping peptide pools for 200 samples.

[0184] Single cell suspensions from the mouse were prepared at a concentration of 10×10⁶ cells/ml. 200 μl of resuspended cells per mouse per condition were seeded into the round bottom of a 96-well plate to provide a final concentration of cells of 2×10⁶ cells/well. The plates were centrifuged at 500 g for 5 minutes at 4° C. and the media was decanted from the cell pellet. The cell pellet was resuspended in 100 μl of AIM V® Tissue culture media and stored at 4° C. until stimulation condition media is added.

[0185] Once the resuspended cells were treated with the appropriate component, the 96 well plate was covered in foil and incubated at 37° C. for 1 hour for the stimulation incubation.

[0186] During the incubation, the golgi plug dilution was prepared as follows noting that for each 96 well plate, enough golgi plug dilution was made for 100 wells at 0.25 μl/well. 19.82 ml of AIM V plus media (with co-stimulatory molecules) was added to a separate tube, and 180 μl of Golgi Plug was added to the tube and mixed well while on ice.

[0187] After 1 hour of the stimulation incubation, 25 μl/well of diluted golgi plug was added to each well, and the plate was incubated for an additional 5 hours at 37° C. for a total of 6 hours of incubation time. After the 6 hours of incubation, the plate was centrifuged at 500 g for 5 minutes at 4° C. The supernatant was removed, 200 μl of AIM V® plus tissue culture media was added to each well, and the cells were resuspended. The plate of cells was placed at 4° C. overnight, and the cells were analyzed for intracellular signaling the next day.

[0188] Extracellular and Intracellular Signaling:

[0189] The plate of cells was centrifuged at 500 g for 5 minutes at 4° C. The supernatant was removed, and cells were washed by resuspending with 150 μl of 1×PBS. Cells were then centrifuged at 500 g for 5 minutes. Following removal of PBS, cells were resuspended in 50 μl of FVD506 cocktail and incubated for 15 minutes at room temperature in the dark (i.e., the plate was wrapped in foil). After 15 minutes, the cells were washed twice by centrifuging at 500×g for 5 minutes and washing in 150 μl cell staining buffer. After the final centrifugation, supernatants were removed, and cells were resuspended in 25 μl of Fc block and incubated for 15 minutes at room temperature in the dark. Next, 25 μl of an extracellular surface stain (CD8 FITC, CD3-APC-ef780, CD4-BV421) was added to each well. Cells were mixed and incubated for 30 minutes at 4° C. in the dark.

[0190] While the cells were incubated for 30 minutes, compensation control beads were prepared by adding one drop of UltraComp beads into a polystyrene tube. 0.5 μl of antibody stain (1 compensation tube per antibody) was added to the tube, the bottom of the tube was flicked to mix the contents, and the tube was incubated at 4° C. for 15 minutes in the dark. 2 ml of cell staining buffer was added to the tube, and the tube was centrifuged at 500 g for 5 minutes at 4° C. The supernatant was removed, and 300 μl of cell staining buffer was added to the beads. The beads were flicked to resuspend, and the compensation control beads were stored at 4° C. until FACS acquisition. The beads were vortexed well prior to acquisition.

[0191] After extracellular staining, cells were centrifuged at 500 g for 5 minutes. Following removal of supernatants, cells were washed with 150 μL cell staining buffer and centrifuged at 500 g for 5 minutes. The supernatant was removed, then 200 μL of fixation and permeabilization solution was added to the cells, and the cells were resuspended and incubated for 20 minutes at 4° C. in the dark. The cells were centrifuged at 500 g for 5 minutes. The supernatant was removed, then the cells were washed twice with 150 μL 1× perm/wash buffer, and the cells were resuspended and centrifuged at 500 g for 5 minutes. (To make 300 mL of 1× BD perm/wash buffer: 30 mL of 10× BD perm/wash buffer was added to 270 mL of distilled water. The solution was mixed well and kept on ice. (600 μL of 1× perm/wash buffer per sample/per well was required)).

[0192] Supernatants were removed and 50 μL of the following intracellular cytokine stain antibody cocktail (IL-2-PE, IFNg-APC, TNFa-PE-Cy7) was added to the cells and incubated for 30 minutes at 4° C. in the dark. The cells were washed with 150 μL 1× perm/wash buffer. Following centrifugation at 500×g for 5 minutes, supernatants were removed, then the cells were washed with 200 μL cell staining buffer. Following the final wash, supernatants were removed, and cells resuspended with 200 μL cell staining buffer. The samples were filtered through AcroPrep™ Advance Plates, then centrifuged at 1500 rpm for 2 minutes. The cells were resuspended in staining buffer and kept on ice or in 4° C. until FACS acquisition via using high-throughput sampling (HTS) plate reader.

### Example 6: Antibody Response Study for Heterologous Prime-Boost Administration of Adenovirus and SMARRT-nCov Constructs

[0193] The primary aim of the study was to compare a 2-dose heterologous regimen of the SMARRT and Ad26 platforms expressing the prefusion stabilized spike antigen to a 2-dose homologous or single dose regimen in Balb/C mice. SMARRT-1159 or Ad26NCOV030 were administered to Balb/C mice at day 0 as a priming administration at indicated doses. The same constructs were administered at the same doses in either a homologous or heterologous boosting administration at day 28 post prime administration (FIG. 11A). A high dose of Ad26NCOV030 (10¹⁰ vp) or an empty Ad26 were included as positive and negative controls. The dose schedule and experimental design is provided below in Table 3 and FIG. 11A.

TABLE 3
Study Design

| Group | 1^{st} Dose | Dose | | 2^{nd} Dose | Dose | | N | Acronym |
|---|---|---|---|---|---|---|---|---|
| 1 | Ad26NCOV030 | 10⁸ | VPs | SMARRT-1159 | 1 | μg | 9 | A-R |
| 2 | SMARRT-1159 | 1 | μg | Ad26NCOV030 | 10⁸ | VPs | 9 | R-A |
| 3 | Ad26NCOV030 | 10⁸ | VPs | Ad26NCOV030 | 10⁸ | VPs | 9 | A-A |
| 4 | SMARRT-1159 | 1 | μg | SMARRT-1159 | 1 | μg | 9 | R-R |
| 5 | Ad26NCOV030 | 10⁸ | VPs | — | — | | 9 | A |
| 6 | SMARRT-1159 | 1 | μg | — | — | | 9 | R |
| 7 | Ad26NCOV030 | 10¹⁰ | VPs | Ad26NCOV030 | 10¹⁰ | VPs | 5 | A-A |
| 8 | Ad26.Empty | 10¹⁰ | VPs | Ad26.Empty | 10¹⁰ | VPs | 5 | A.empty (2x) |

[0194] An ELISA assay was used to measure the spike protein specific IgG titers produced after administration of the prime and boost compositions. After administration of the prime composition, the spike protein specific IgG titers were measured at days 14 and 27. All animals that received SMARRT-1159 elicited spike specific antibodies as early as 2 weeks that were maintained until week 4 (FIGS. 11B-11C).

[0195] After administration of the boost, the spike protein specific IgG titers were measured at days 42 (FIG. 11D) and 54 (FIG. 11E). A second dose of the SMARRT or Ad26 constructs boosted the spike protein specific antibody titers when measured at 42 and 54 days as compared to the day 27 titers. The SMARRT-1159-Ad26NCOV2 regimen (R-A) had significantly higher antibody response relative to the Ad26NCOV2-SMARRT-1159 (A-R) regimen, which were maintained out to day 56.

[0196] At day 56 ELISAs measuring both IgG1 and IgG2 isotype levels in the serum were performed. Animals that received SMARRT-1159 for the prime had higher levels of spike-specific IgG2a isotype antibodies. As a result they also had higher IgG2a:IgG1 ratios suggesting a Th1 skewed response (FIGS. 12A-12B).

[0197] Viral neutralization titers were measured at day 56. A trend for increased neutralization titers was observed when animals primed with SMARRT-1159 were boosted with either SMARRT-1159 or Ad26NCOV030 (FIG. 13).

[0198] FIGS. 14A-14B demonstrated a 2-dose heterologous or homologous regimen elicited similar levels of IFNγ secreting cells in the spleens of immunized animals 4 weeks after the second dose at day 56.

### REFERENCES

[0199] Belouzard et al. (2009), Proc Natl Acad Sci USA 106:5871-6.
[0200] Bosch et al. (2008), J Virol 82:8887-90.
[0201] Follis et al. (2006) Virology 350:358-69.
[0202] Madu et al. (2009), J Virol 83:7411-21.
[0203] Walls et al. (2016), Nature 531:114-7.
[0204] Wrapp et. al. (2020) Science 367(6482): 1260-1263.
[0205] Hoffmann et al. (2020) BioRxiv: doi: https://doi.org/10.1101/2020.01.31.929042
[0206] Bestle et al (2020) BioRxiv doi: https://doi.org/10.1101/2020.04.15.042085
[0207] Hastie et al. (2017), Science 356, 923-928.
[0208] Krarup et al (2015), Nat Commun 6, 8143.
[0209] Pallesen et al. (2017), Proc Natl Acad Sci USA 114, E7348-E7357.
[0210] Rutten et al. (2020), Cell Rep. 30(13):4540-4550.
[0211] Letarov et al. (1993), Biochemistry Moscow 64: 817-823.
[0212] S-Guthe et al. (2004), J. Mol. Biol. 337: 905-915

Sequences

SEQ ID NO 1: full length S protein (underline signal peptide, double underline TM and cytoplasmic
domain that is deleted in the soluble version):
MFVFLVLLPLVSSQCVNLTTRTQLPPAYTNSFTRGVYYPDKVFRSSVLHSTQDLFLPFFSNVTWFHAIHVSGTNGTKRFD
NPVLPFNDGVYFASTEKSNIIRGWIFGTTLDSKTQSLLIVNNATNVVIKVCEFQFCNDPFLGVYYHKNNKSWMESEFRVY
SSANNCTFEYVSQPFLMDLEGKQGNFKNLREFVFKNIDGYFKIYSKHTPINLVRDLPQGFSALEPLVDLPIGINITRFQTLL
ALHRSYLTPGDSSSGWTAGAAAYYVGYLQPRTFLLKYNENGTITDAVDCALDPLSETKCTLKSFTVEKGIYQTSNFRVQP
TESIVRFPNITNLCPFGEVFNATRFASVYAWNRKRISNCVADYSVLYNSASFSTFKCYGVSPTKLNDLCFTNVYADSFVIR
GDEVRQIAPGQTGKIADYNYKLPDDFTGCVIAWNSNNLDSKVGGNYNYLYRLFRKSNLKPFERDISTEIYQAGSTPCNG
VEGFNCYFPLQSYGFQPTNGVGYQPYRVVVLSFELLHAPATVCGPKKSTNLVKNKCVNFNFNGLTGTGVLTESNKKFLP
FQQFGRDIADTTDAVRDPQTLEILDITPCSFGGVSVITPGTNTSNQVAVLYQDVNCTEVPVAIHADQLTPTWRVYSTGS
NVFQTRAGCLIGAEHVNNSYECDIPIGAGICASYQTQTNSPRRARSVASQSIIAYTMSLGAENSVAYSNNSIAIPTNFTISV
TTEILPVSMTKTSVDCTMYICGDSTECSNLLLQYGSFCTQLNRALTGIAVEQDKNTQEVFAQVKQIYKTPPIKDFGGFNFS
QILPDPSKPSKRSFIEDLLFNKVTLADAGFIKQYGDCLGDIAARDLICAQKFNGLTVLPPLLTDEMIAQYTSALLAGTITSG
WTFGAGAALQIPFAMQMAYRFNGIGVTQNVLYENQKLIANQFNSAIGKIQDSLSSTASALGKLQDVVNQNAQALNTL
VKQLSSNFGAISSVLNDILSRLDKVEAEVQIDRLITGRLQSLQTYVTQQLIRAAEIRASANLAATKMSECVLGQSKRVDFC
GKGYHLMSFPQSAPHGVVFLHVTYVPAQEKNFTTAPAICHDGKAHFPREGVFVSNGTHWFVTQRNFYEPQIITTDNTF
VSGNCDVVIGIVNNTVYDPLQPELDSFKEELDKYFKNHTSPDVDLGDISGINASVVNIQKEIDRLNEVAKNLNESLIDLQE
LGKYEQYIKWPWYIWLGFIAGLIAIVMVTIMLCCMTSCCSCLKGCCSCGSCCKFDEDDSEPVLKGVKLHYT
SEQ ID NO 2: soluble 5 protein with furin KO, underline signal peptide, double underline linker,
foldon, tags etc.):
MFVFLVLLPLVSSQCVNLTTRTQLPPAYTNSFTRGVYYPDKVFRSSVLHSTQDLFLPFFSNVTWFHAIHVSGTNGTKRFD
NPVLPFNDGVYFASTEKSNIIRGWIFGTTLDSKTQSLLIVNNATNVVIKVCEFQFCNDPFLGVYYHKNNKSWMESEFRVY
SSANNCTFEYVSQPFLMDLEGKQGNFKNLREFVFKNIDGYFKIYSKHTPINLVRDLPQGFSALEPLVDLPIGINITRFQTLL
ALHRSYLTPGDSSSGWTAGAAAYYVGYLQPRTFLLKYNENGTITDAVDCALDPLSETKCTLKSFTVEKGIYQTSNFRVQP
TESIVRFPNITNLCPFGEVFNATRFASVYAWNRKRISNCVADYSVLYNSASFSTFKCYGVSPTKLNDLCFTNVYADSFVIR
GDEVRQIAPGQTGKIADYNYKLPDDFTGCVIAWNSNNLDSKVGGNYNYLYRLFRKSNLKPFERDISTEIYQAGSTPCNG
VEGFNCYFPLQSYGFQPTNGVGYQPYRVVVLSFELLHAPATVCGPKKSTNLVKNKCVNFNFNGLTGTGVLTESNKKFLP
FQQFGRDIADTTDAVRDPQTLEILDITPCSFGGVSVITPGTNTSNQVAVLYQDVNCTEVPVAIHADQLTPTWRVYSTGS
NVFQTRAGCLIGAEHVNNSYECDIPIGAGICASYQTQTNSPSRAGSVASQSIIAYTMSLGAENSVAYSNNSIAIPTNFTISV
TTEILPVSMTKTSVDCTMYICGDSTECSNLLLQYGSFCTQLNRALTGIAVEQDKNTQEVFAQVKQIYKTPPIKDFGGFNFS
QILPDPSKPSKRSFIEDLLFNKVTLADAGFIKQYGDCLGDIAARDLICAQKFNGLTVLPPLLTDEMIAQYTSALLAGTITSG
WTFGAGAALQIPFAMQMAYRFNGIGVTQNVLYENQKLIANQFNSAIGKIQDSLSSTASALGKLQDVVNQNAQALNTL
VKQLSSNFGAISSVLNDILSRLDKVEAEVQIDRLITGRLQSLQTYVTQQLIRAAEIRASANLAATKMSECVLGQSKRVDFC
GKGYHLMSFPQSAPHGVVFLHVTYVPAQEKNFTTAPAICHDGKAHFPREGVFVSNGTHWFVTQRNFYEPQIITTDNTF
VSGNCDVVIGIVNNTVYDPLQPELDSFKEELDKYFKNHTSPDVDLGDISGINASVVNIQKEIDRLNEVAKNLNESLIDLQE
LGKYEQGSGYIPEAPRDGQAYVRKDGEWVLLSTFLGRSLEVLFQGPGSLPETGGGSDYKDDDDKGGGGSGGGGSGGG
GSGGGGSGGGGSHHHHHH
SEQ ID NO 3: soluble 5 protein with Furin KO and double proline in the hinge loop. (underline signal
peptide) double underline linker, foldon, tags etc.)
MFVFLVLLPLVSSQCVNLTTRTQLPPAYTNSFTRGVYYPDKVFRSSVLHSTQDLFLPFFSNVTWFHAIHVSGTNGTKRFD
NPVLPFNDGVYFASTEKSNIIRGWIFGTTLDSKTQSLLIVNNATNVVIKVCEFQFCNDPFLGVYYHKNNKSWMESEFRVY
SSANNCTFEYVSQPFLMDLEGKQGNFKNLREFVFKNIDGYFKIYSKHTPINLVRDLPQGFSALEPLVDLPIGINITRFQTLL
ALHRSYLTPGDSSSGWTAGAAAYYVGYLQPRTFLLKYNENGTITDAVDCALDPLSETKCTLKSFTVEKGIYQTSNFRVQP
TESIVRFPNITNLCPFGEVFNATRFASVYAWNRKRISNCVADYSVLYNSASFSTFKCYGVSPTKLNDLCFTNVYADSFVIR
GDEVRQIAPGQTGKIADYNYKLPDDFTGCVIAWNSNNLDSKVGGNYNYLYRLFRKSNLKPFERDISTEIYQAGSTPCNG
VEGFNCYFPLQSYGFQPTNGVGYQPYRVVVLSFELLHAPATVCGPKKSTNLVKNKCVNFNFNGLTGTGVLTESNKKFLP
FQQFGRDIADTTDAVRDPQTLEILDITPCSFGGVSVITPGTNTSNQVAVLYQDVNCTEVPVAIHADQLTPTWRVYSTGS
NVFQTRAGCLIGAEHVNNSYECDIPIGAGICASYQTQTNSPSRAGSVASQSIIAYTMSLGAENSVAYSNNSIAIPTNFTISV
TTEILPVSMTKTSVDCTMYICGDSTECSNLLLQYGSFCTQLNRALTGIAVEQDKNTQEVFAQVKQIYKTPPIKDFGGFNFS
QILPDPSKPSKRSFIEDLLFNKVTLADAGFIKQYGDCLGDIAARDLICAQKFNGLTVLPPLLTDEMIAQYTSALLAGTITSG
WTFGAGAALQIPFAMQMAYRFNGIGVTQNVLYENQKLIANQFNSAIGKIQDSLSSTASALGKLQDVVNQNAQALNTL
VKQLSSNFGAISSVLNDILSRLDPPEAEVQIDRLITGRLQSLQTYVTQQLIRAAEIRASANLAATKMSECVLGQSKRVDFC
GKGYHLMSFPQSAPHGVVFLHVTYVPAQEKNFTTAPAICHDGKAHFPREGVFVSNGTHWFVTQRNFYEPQIITTDNTF
VSGNCDVVIGIVNNTVYDPLQPELDSFKEELDKYFKNHTSPDVDLGDISGINASVVNIQKEIDRLNEVAKNLNESLIDLQE
LGKYEQGSGYIPEAPRDGQAYVRKDGEWVLLSTFLGRSLEVLFQGPGSLPETGGGSDYKDDDDKGGGGSGGGGSGGG
GSGGGGSGGGGSHHHHHH
SEQ ID NO 4: foldon
GYIPEAPRDGQAYVRKDGEWVLLSTFL
SEQ ID NO 5: SEQ ID NO 2 + A942P
MFVFLVLLPLVSSQCVNLTTRTQLPPAYTNSFTRGVYYPDKVFRSSVLHSTQDLFLPFFSNVTWFHAIHVSGTNGTKRFD
NPVLPFNDGVYFASTEKSNIIRGWIFGTTLDSKTQSLLIVNNATNVVIKVCEFQFCNDPFLGVYYHKNNKSWMESEFRVY
SSANNCTFEYVSQPFLMDLEGKQGNFKNLREFVFKNIDGYFKIYSKHTPINLVRDLPQGFSALEPLVDLPIGINITRFQTLL
ALHRSYLTPGDSSSGWTAGAAAYYVGYLQPRTFLLKYNENGTITDAVDCALDPLSETKCTLKSFTVEKGIYQTSNFRVQP
TESIVRFPNITNLCPFGEVFNATRFASVYAWNRKRISNCVADYSVLYNSASFSTFKCYGVSPTKLNDLCFTNVYADSFVIR
GDEVRQIAPGQTGKIADYNYKLPDDFTGCVIAWNSNNLDSKVGGNYNYLYRLFRKSNLKPFERDISTEIYQAGSTPCNG
VEGFNCYFPLQSYGFQPTNGVGYQPYRVVVLSFELLHAPATVCGPKKSTNLVKNKCVNFNFNGLTGTGVLTESNKKFLP
FQQFGRDIADTTDAVRDPQTLEILDITPCSFGGVSVITPGTNTSNQVAVLYQDVNCTEVPVAIHADQLTPTWRVYSTGS
NVFQTRAGCLIGAEHVNNSYECDIPIGAGICASYQTQTNSPSRAGSVASQSIIAYTMSLGAENSVAYSNNSIAIPTNFTISV
TTEILPVSMTKTSVDCTMYICGDSTECSNLLLQYGSFCTQLNRALTGIAVEQDKNTQEVFAQVKQIYKTPPIKDFGGFNFS
QILPDPSKPSKRSFIEDLLFNKVTLADAGFIKQYGDCLGDIAARDLICAQKFNGLTVLPPLLTDEMIAQYTSALLAGTITSG
WTFGAGAALQIPFAMQMAYRFNGIGVTQNVLYENQKLIANQFNSAIGKIQDSLSSTPSALGKLQDVVNQNAQALNTL
VKQLSSNFGAISSVLNDILSRLDKVEAEVQIDRLITGRLQSLQTYVTQQLIRAAEIRASANLAATKMSECVLGQSKRVDFC
GKGYHLMSFPQSAPHGVVFLHVTYVPAQEKNFTTAPAICHDGKAHFPREGVFVSNGTHWFVTQRNFYEPQIITTDNTF
VSGNCDVVIGIVNNTVYDPLQPELDSFKEELDKYFKNHTSPDVDLGDISGINASVVNIQKEIDRLNEVAKNLNESLIDLQE
LGKYEQGSGYIPEAPRDGQAYVRKDGEWVLLSTFLGRSLEVLFQGPGSLPETGGGSDYKDDDDKGGGGSGGGGSGGG
GSGGGGSGGGGSHHHHHH
SEQ ID NO 6: SEQ ID NO 2 + A892P
MFVFLVLLPLVSSQCVNLTTRTQLPPAYTNSFTRGVYYPDKVFRSSVLHSTQDLFLPFFSNVTWFHAIHVSGTNGTKRFD
NPVLPFNDGVYFASTEKSNIIRGWIFGTTLDSKTQSLLIVNNATNVVIKVCEFQFCNDPFLGVYYHKNNKSWMESEFRVY
SSANNCTFEYVSQPFLMDLEGKQGNFKNLREFVFKNIDGYFKIYSKHTPINLVRDLPQGFSALEPLVDLPIGINITRFQTLL
ALHRSYLTPGDSSSGWTAGAAAYYVGYLQPRTFLLKYNENGTITDAVDCALDPLSETKCTLKSFTVEKGIYQTSNFRVQP
TESIVRFPNITNLCPFGEVFNATRFASVYAWNRKRISNCVADYSVLYNSASFSTFKCYGVSPTKLNDLCFTNVYADSFVIR
GDEVRQIAPGQTGKIADYNYKLPDDFTGCVIAWNSNNLDSKVGGNYNYLYRLFRKSNLKPFERDISTEIYQAGSTPCNG
VEGFNCYFPLQSYGFQPTNGVGYQPYRVVVLSFELLHAPATVCGPKKSTNLVKNKCVNFNFNGLTGTGVLTESNKKFLP
FQQFGRDIADTTDAVRDPQTLEILDITPCSFGGVSVITPGTNTSNQVAVLYQDVNCTEVPVAIHADQLTPTWRVYSTGS
NVFQTRAGCLIGAEHVNNSYECDIPIGAGICASYQTQTNSPSRAGSVASQSIIAYTMSLGAENSVAYSNNSIAIPTNFTISV
TTEILPVSMTKTSVDCTMYICGDSTECSNLLLQYGSFCTQLNRALTGIAVEQDKNTQEVFAQVKQIYKTPPIKDFGGFNFS
QILPDPSKPSKRSFIEDLLFNKVTLADAGFIKQYGDCLGDIAARDLICAQKFNGLTVLPPLLTDEMIAQYTSALLAGTITSG
WTFGAGPALQIPFAMQMAYRFNGIGVTQNVLYENQKLIANQFNSAIGKIQDSLSSTASALGKLQDVVNQNAQALNTL
VKQLSSNFGAISSVLNDILSRLDKVEAEVQIDRLITGRLQSLQTYVTQQLIRAAEIRASANLAATKMSECVLGQSKRVDFC
GKGYHLMSFPQSAPHGVVFLHVTYVPAQEKNFTTAPAICHDGKAHFPREGVFVSNGTHWFVTQRNFYEPQIITTDNTF
VSGNCDVVIGIVNNTVYDPLQPELDSFKEELDKYFKNHTSPDVDLGDISGINASVVNIQKEIDRLNEVAKNLNESLIDLQE
LGKYEQGSGYIPEAPRDGQAYVRKDGEWVLLSTFLGRSLEVLFQGPGSLPETGGGSDYKDDDDKGGGGSGGGGSGGG
GSGGGGSGGGGSHHHHHH
SEQ ID NO 7: SEQ ID NO 2 + D614N
MFVFLVLLPLVSSQCVNLTTRTQLPPAYTNSFTRGVYYPDKVFRSSVLHSTQDLFLPFFSNVTWFHAIHVSGTNGTKRFD
NPVLPFNDGVYFASTEKSNIIRGWIFGTTLDSKTQSLLIVNNATNVVIKVCEFQFCNDPFLGVYYHKNNKSWMESEFRVY
SSANNCTFEYVSQPFLMDLEGKQGNFKNLREFVFKNIDGYFKIYSKHTPINLVRDLPQGFSALEPLVDLPIGINITRFQTLL
ALHRSYLTPGDSSSGWTAGAAAYYVGYLQPRTFLLKYNENGTITDAVDCALDPLSETKCTLKSFTVEKGIYQTSNFRVQP
TESIVRFPNITNLCPFGEVFNATRFASVYAWNRKRISNCVADYSVLYNSASFSTFKCYGVSPTKLNDLCFTNVYADSFVIR
GDEVRQIAPGQTGKIADYNYKLPDDFTGCVIAWNSNNLDSKVGGNYNYLYRLFRKSNLKPFERDISTEIYQAGSTPCNG
VEGFNCYFPLQSYGFQPTNGVGYQPYRVVVLSFELLHAPATVCGPKKSTNLVKNKCVNFNFNGLTGTGVLTESNKKFLP
FQQFGRDIADTTDAVRDPQTLEILDITPCSFGGVSVITPGTNTSNQVAVLYQNVNCTEVPVAIHADQLTPTWRVYSTGS
NVFQTRAGCLIGAEHVNNSYECDIPIGAGICASYQTQTNSPSRAGSVASQSIIAYTMSLGAENSVAYSNNSIAIPTNFTISV
TTEILPVSMTKTSVDCTMYICGDSTECSNLLLQYGSFCTQLNRALTGIAVEQDKNTQEVFAQVKQIYKTPPIKDFGGFNFS
QILPDPSKPSKRSFIEDLLFNKVTLADAGFIKQYGDCLGDIAARDLICAQKFNGLTVLPPLLTDEMIAQYTSALLAGTITSG
WTFGAGAALQIPFAMQMAYRFNGIGVTQNVLYENQKLIANQFNSAIGKIQDSLSSTASALGKLQDVVNQNAQALNTL
VKQLSSNFGAISSVLNDILSRLDKVEAEVQIDRLITGRLQSLQTYVTQQLIRAAEIRASANLAATKMSECVLGQSKRVDFC
GKGYHLMSFPQSAPHGVVFLHVTYVPAQEKNFTTAPAICHDGKAHFPREGVFVSNGTHWFVTQRNFYEPQIITTDNTF
VSGNCDVVIGIVNNTVYDPLQPELDSFKEELDKYFKNHTSPDVDLGDISGINASVVNIQKEIDRLNEVAKNLNESLIDLQE
LGKYEQGSGYIPEAPRDGQAYVRKDGEWVLLSTFLGRSLEVLFQGPGSLPETGGGSDYKDDDDKGGGGSGGGGSGGG
GSGGGGSGGGGSHHHHHH
SEQ ID NO 8: SEQ ID NO 2 + T572I
MFVFLVLLPLVSSQCVNLTTRTQLPPAYTNSFTRGVYYPDKVFRSSVLHSTQDLFLPFFSNVTWFHAIHVSGTNGTKRFD
NPVLPFNDGVYFASTEKSNIIRGWIFGTTLDSKTQSLLIVNNATNVVIKVCEFQFCNDPFLGVYYHKNNKSWMESEFRVY
SSANNCTFEYVSQPFLMDLEGKQGNFKNLREFVFKNIDGYFKIYSKHTPINLVRDLPQGFSALEPLVDLPIGINITRFQTLL
ALHRSYLTPGDSSSGWTAGAAAYYVGYLQPRTFLLKYNENGTITDAVDCALDPLSETKCTLKSFTVEKGIYQTSNFRVQP
TESIVRFPNITNLCPFGEVFNATRFASVYAWNRKRISNCVADYSVLYNSASFSTFKCYGVSPTKLNDLCFTNVYADSFVIR
GDEVRQIAPGQTGKIADYNYKLPDDFTGCVIAWNSNNLDSKVGGNYNYLYRLFRKSNLKPFERDISTEIYQAGSTPCNG
VEGFNCYFPLQSYGFQPTNGVGYQPYRVVVLSFELLHAPATVCGPKKSTNLVKNKCVNFNFNGLTGTGVLTESNKKFLP
FQQFGRDIADITDAVRDPQTLEILDITPCSFGGVSVITPGTNTSNQVAVLYQDVNCTEVPVAIHADQLTPTWRVYSTGS
NVFQTRAGCLIGAEHVNNSYECDIPIGAGICASYQTQTNSPSRAGSVASQSIIAYTMSLGAENSVAYSNNSIAIPTNFTISV
TTEILPVSMTKTSVDCTMYICGDSTECSNLLLQYGSFCTQLNRALTGIAVEQDKNTQEVFAQVKQIYKTPPIKDFGGFNFS
QILPDPSKPSKRSFIEDLLFNKVTLADAGFIKQYGDCLGDIAARDLICAQKFNGLTVLPPLLTDEMIAQYTSALLAGTITSG
WTFGAGAALQIPFAMQMAYRFNGIGVTQNVLYENQKLIANQFNSAIGKIQDSLSSTASALGKLQDVVNQNAQALNTL
VKQLSSNFGAISSVLNDILSRLDKVEAEVQIDRLITGRLQSLQTYVTQQLIRAAEIRASANLAATKMSECVLGQSKRVDFC
GKGYHLMSFPQSAPHGVVFLHVTYVPAQEKNFTTAPAICHDGKAHFPREGVFVSNGTHWFVTQRNFYEPQIITTDNTF
VSGNCDVVIGIVNNTVYDPLQPELDSFKEELDKYFKNHTSPDVDLGDISGINASVVNIQKEIDRLNEVAKNLNESLIDLQE
LGKYEQGSGYIPEAPRDGQAYVRKDGEWVLLSTFLGRSLEVLFQGPGSLPETGGGSDYKDDDDKGGGGSGGGGSGGG
GSGGGGSGGGGSHHHHHH
SEQ ID NO 9: SEQ ID NO 2 + N532P
MFVFLVLLPLVSSQCVNLTTRTQLPPAYTNSFTRGVYYPDKVFRSSVLHSTQDLFLPFFSNVTWFHAIHVSGTNGTKRFD
NPVLPFNDGVYFASTEKSNIIRGWIFGTTLDSKTQSLLIVNNATNVVIKVCEFQFCNDPFLGVYYHKNNKSWMESEFRVY
SSANNCTFEYVSQPFLMDLEGKQGNFKNLREFVFKNIDGYFKIYSKHTPINLVRDLPQGFSALEPLVDLPIGINITRFQTLL
ALHRSYLTPGDSSSGWTAGAAAYYVGYLQPRTFLLKYNENGTITDAVDCALDPLSETKCTLKSFTVEKGIYQTSNFRVQP
TESIVRFPNITNLCPFGEVFNATRFASVYAWNRKRISNCVADYSVLYNSASFSTFKCYGVSPTKLNDLCFTNVYADSFVIR
GDEVRQIAPGQTGKIADYNYKLPDDFTGCVIAWNSNNLDSKVGGNYNYLYRLFRKSNLKPFERDISTEIYQAGSTPCNG
VEGFNCYFPLQSYGFQPTNGVGYQPYRVVVLSFELLHAPATVCGPKKSTPLVKNKCVNFNFNGLTGTGVLTESNKKFLP
FQQFGRDIADTTDAVRDPQTLEILDITPCSFGGVSVITPGTNTSNQVAVLYQDVNCTEVPVAIHADQLTPTWRVYSTGS
NVFQTRAGCLIGAEHVNNSYECDIPIGAGICASYQTQTNSPSRAGSVASQSIIAYTMSLGAENSVAYSNNSIAIPTNFTISV
TTEILPVSMTKTSVDCTMYICGDSTECSNLLLQYGSFCTQLNRALTGIAVEQDKNTQEVFAQVKQIYKTPPIKDFGGFNFS
QILPDPSKPSKRSFIEDLLFNKVTLADAGFIKQYGDCLGDIAARDLICAQKFNGLTVLPPLLTDEMIAQYTSALLAGTITSG
WTFGAGAALQIPFAMQMAYRFNGIGVTQNVLYENQKLIANQFNSAIGKIQDSLSSTASALGKLQDVVNQNAQALNTL
VKQLSSNFGAISSVLNDILSRLDKVEAEVQIDRLITGRLQSLQTYVTQQLIRAAEIRASANLAATKMSECVLGQSKRVDFC
GKGYHLMSFPQSAPHGVVFLHVTYVPAQEKNFTTAPAICHDGKAHFPREGVFVSNGTHWFVTQRNFYEPQIITTDNTF
VSGNCDVVIGIVNNTVYDPLQPELDSFKEELDKYFKNHTSPDVDLGDISGINASVVNIQKEIDRLNEVAKNLNESLIDLQE
LGKYEQGSGYIPEAPRDGQAYVRKDGEWVLLSTFLGRSLEVLFQGPGSLPETGGGSDYKDDDDKGGGGSGGGGSGGG
GSGGGGSGGGGSHHHHHH
SEQ ID NO 10: SEQ ID NO 2 + G880C + F888C
MFVFLVLLPLVSSQCVNLTTRTQLPPAYTNSFTRGVYYPDKVFRSSVLHSTQDLFLPFFSNVTWFHAIHVSGTNGTKRFD
NPVLPFNDGVYFASTEKSNIIRGWIFGTTLDSKTQSLLIVNNATNVVIKVCEFQFCNDPFLGVYYHKNNKSWMESEFRVY
SSANNCTFEYVSQPFLMDLEGKQGNFKNLREFVFKNIDGYFKIYSKHTPINLVRDLPQGFSALEPLVDLPIGINITRFQTLL
ALHRSYLTPGDSSSGWTAGAAAYYVGYLQPRTFLLKYNENGTITDAVDCALDPLSETKCTLKSFTVEKGIYQTSNFRVQP
TESIVRFPNITNLCPFGEVFNATRFASVYAWNRKRISNCVADYSVLYNSASFSTFKCYGVSPTKLNDLCFTNVYADSFVIR
GDEVRQIAPGQTGKIADYNYKLPDDFTGCVIAWNSNNLDSKVGGNYNYLYRLFRKSNLKPFERDISTEIYQAGSTPCNG
VEGFNCYFPLQSYGFQPTNGVGYQPYRVVVLSFELLHAPATVCGPKKSTNLVKNKCVNFNFNGLTGTGVLTESNKKFLP
FQQFGRDIADTTDAVRDPQTLEILDITPCSFGGVSVITPGTNTSNQVAVLYQDVNCTEVPVAIHADQLTPTWRVYSTGS
NVFQTRAGCLIGAEHVNNSYECDIPIGAGICASYQTQTNSPSRAGSVASQSIIAYTMSLGAENSVAYSNNSIAIPTNFTISV
TTEILPVSMTKTSVDCTMYICGDSTECSNLLLQYGSFCTQLNRALTGIAVEQDKNTQEVFAQVKQIYKTPPIKDFGGFNFS
QILPDPSKPSKRSFIEDLLFNKVTLADAGFIKQYGDCLGDIAARDLICAQKFNGLTVLPPLLTDEMIAQYTSALLACTITSG
WTCGAGAALQIPFAMQMAYRFNGIGVTQNVLYENQKLIANQFNSAIGKIQDSLSSTASALGKLQDVVNQNAQALNTL
VKQLSSNFGAISSVLNDILSRLDKVEAEVQIDRLITGRLQSLQTYVTQQLIRAAEIRASANLAATKMSECVLGQSKRVDFC
GKGYHLMSFPQSAPHGVVFLHVTYVPAQEKNFTTAPAICHDGKAHFPREGVFVSNGTHWFVTQRNFYEPQIITTDNTF
VSGNCDVVIGIVNNTVYDPLQPELDSFKEELDKYFKNHTSPDVDLGDISGINASVVNIQKEIDRLNEVAKNLNESLIDLQE
LGKYEQGSGYIPEAPRDGQAYVRKDGEWVLLSTFLGRSLEVLFQGPGSLPETGGGSDYKDDDDKGGGGSGGGGSGGG
GSGGGGSGGGGSHHHHHH
SEQ ID NO 11: SEQ ID NO 2 + S884C + A893C
MFVFLVLLPLVSSQCVNLTTRTQLPPAYTNSFTRGVYYPDKVFRSSVLHSTQDLFLPFFSNVTWFHAIHVSGTNGTKRFD
NPVLPFNDGVYFASTEKSNIIRGWIFGTTLDSKTQSLLIVNNATNVVIKVCEFQFCNDPFLGVYYHKNNKSWMESEFRVY
SSANNCTFEYVSQPFLMDLEGKQGNFKNLREFVFKNIDGYFKIYSKHTPINLVRDLPQGFSALEPLVDLPIGINITRFQTLL
ALHRSYLTPGDSSSGWTAGAAAYYVGYLQPRTFLLKYNENGTITDAVDCALDPLSETKCTLKSFTVEKGIYQTSNFRVQP
TESIVRFPNITNLCPFGEVFNATRFASVYAWNRKRISNCVADYSVLYNSASFSTFKCYGVSPTKLNDLCFTNVYADSFVIR
GDEVRQIAPGQTGKIADYNYKLPDDFTGCVIAWNSNNLDSKVGGNYNYLYRLFRKSNLKPFERDISTEIYQAGSTPCNG
VEGFNCYFPLQSYGFQPTNGVGYQPYRVVVLSFELLHAPATVCGPKKSTNLVKNKCVNFNFNGLTGTGVLTESNKKFLP
FQQFGRDIADTTDAVRDPQTLEILDITPCSFGGVSVITPGTNTSNQVAVLYQDVNCTEVPVAIHADQLTPTWRVYSTGS
NVFQTRAGCLIGAEHVNNSYECDIPIGAGICASYQTQTNSPSRAGSVASQSIIAYTMSLGAENSVAYSNNSIAIPTNFTISV
TTEILPVSMTKTSVDCTMYICGDSTECSNLLLQYGSFCTQLNRALTGIAVEQDKNTQEVFAQVKQIYKTPPIKDFGGFNFS
QILPDPSKPSKRSFIEDLLFNKVTLADAGFIKQYGDCLGDIAARDLICAQKFNGLTVLPPLLTDEMIAQYTSALLAGTITCG
WTFGAGACLQIPFAMQMAYRFNGIGVTQNVLYENQKLIANQFNSAIGKIQDSLSSTASALGKLQDVVNQNAQALNTL
VKQLSSNFGAISSVLNDILSRLDKVEAEVQIDRLITGRLQSLQTYVTQQLIRAAEIRASANLAATKMSECVLGQSKRVDFC
GKGYHLMSFPQSAPHGVVFLHVTYVPAQEKNFTTAPAICHDGKAHFPREGVFVSNGTHWFVTQRNFYEPQIITTDNTF
VSGNCDVVIGIVNNTVYDPLQPELDSFKEELDKYFKNHTSPDVDLGDISGINASVVNIQKEIDRLNEVAKNLNESLIDLQE
LGKYEQGSGYIPEAPRDGQAYVRKDGEWVLLSTFLGRSLEVLFQGPGSLPETGGGSDYKDDDDKGGGGSGGGGSGGG
GSGGGGSGGGGSHHHHHH
SEQ ID NO 12: SEQ ID NO 3 + A942P
MFVFLVLLPLVSSQCVNLTTRTQLPPAYTNSFTRGVYYPDKVFRSSVLHSTQDLFLPFFSNVTWFHAIHVSGTNGTKRFD
NPVLPFNDGVYFASTEKSNIIRGWIFGTTLDSKTQSLLIVNNATNVVIKVCEFQFCNDPFLGVYYHKNNKSWMESEFRVY
SSANNCTFEYVSQPFLMDLEGKQGNFKNLREFVFKNIDGYFKIYSKHTPINLVRDLPQGFSALEPLVDLPIGINITRFQTLL
ALHRSYLTPGDSSSGWTAGAAAYYVGYLQPRTFLLKYNENGTITDAVDCALDPLSETKCTLKSFTVEKGIYQTSNFRVQP
TESIVRFPNITNLCPFGEVFNATRFASVYAWNRKRISNCVADYSVLYNSASFSTFKCYGVSPTKLNDLCFTNVYADSFVIR
GDEVRQIAPGQTGKIADYNYKLPDDFTGCVIAWNSNNLDSKVGGNYNYLYRLFRKSNLKPFERDISTEIYQAGSTPCNG
VEGFNCYFPLQSYGFQPTNGVGYQPYRVVVLSFELLHAPATVCGPKKSTNLVKNKCVNFNFNGLTGTGVLTESNKKFLP
FQQFGRDIADTTDAVRDPQTLEILDITPCSFGGVSVITPGTNTSNQVAVLYQDVNCTEVPVAIHADQLTPTWRVYSTGS
NVFQTRAGCLIGAEHVNNSYECDIPIGAGICASYQTQTNSPSRAGSVASQSIIAYTMSLGAENSVAYSNNSIAIPTNFTISV
TTEILPVSMTKTSVDCTMYICGDSTECSNLLLQYGSFCTQLNRALTGIAVEQDKNTQEVFAQVKQIYKTPPIKDFGGFNFS
QILPDPSKPSKRSFIEDLLFNKVTLADAGFIKQYGDCLGDIAARDLICAQKFNGLTVLPPLLTDEMIAQYTSALLAGTITSG
WTFGAGAALQIPFAMQMAYRFNGIGVTQNVLYENQKLIANQFNSAIGKIQDSLSSTPSALGKLQDVVNQNAQALNTL
VKQLSSNFGAISSVLNDILSRLDPPEAEVQIDRLITGRLQSLQTYVTQQLIRAAEIRASANLAATKMSECVLGQSKRVDFC
GKGYHLMSFPQSAPHGVVFLHVTYVPAQEKNFTTAPAICHDGKAHFPREGVFVSNGTHWFVTQRNFYEPQIITTDNTF
VSGNCDVVIGIVNNTVYDPLQPELDSFKEELDKYFKNHTSPDVDLGDISGINASVVNIQKEIDRLNEVAKNLNESLIDLQE
LGKYEQGSGYIPEAPRDGQAYVRKDGEWVLLSTFLGRSLEVLFQGPGSLPETGGGSDYKDDDDKGGGGSGGGGSGGG
GSGGGGSGGGGSHHHHHH
SEQ ID NO 13: SEQ ID NO 3 + A892P
MFVFLVLLPLVSSQCVNLTTRTQLPPAYTNSFTRGVYYPDKVFRSSVLHSTQDLFLPFFSNVTWFHAIHVSGTNGTKRFD
NPVLPFNDGVYFASTEKSNIIRGWIFGTTLDSKTQSLLIVNNATNVVIKVCEFQFCNDPFLGVYYHKNNKSWMESEFRVY
SSANNCTFEYVSQPFLMDLEGKQGNFKNLREFVFKNIDGYFKIYSKHTPINLVRDLPQGFSALEPLVDLPIGINITRFQTLL
ALHRSYLTPGDSSSGWTAGAAAYYVGYLQPRTFLLKYNENGTITDAVDCALDPLSETKCTLKSFTVEKGIYQTSNFRVQP
TESIVRFPNITNLCPFGEVFNATRFASVYAWNRKRISNCVADYSVLYNSASFSTFKCYGVSPTKLNDLCFTNVYADSFVIR
GDEVRQIAPGQTGKIADYNYKLPDDFTGCVIAWNSNNLDSKVGGNYNYLYRLFRKSNLKPFERDISTEIYQAGSTPCNG
VEGFNCYFPLQSYGFQPTNGVGYQPYRVVVLSFELLHAPATVCGPKKSTNLVKNKCVNFNFNGLTGTGVLTESNKKFLP
FQQFGRDIADTTDAVRDPQTLEILDITPCSFGGVSVITPGTNTSNQVAVLYQDVNCTEVPVAIHADQLTPTWRVYSTGS
NVFQTRAGCLIGAEHVNNSYECDIPIGAGICASYQTQTNSPSRAGSVASQSIIAYTMSLGAENSVAYSNNSIAIPTNFTISV
TTEILPVSMTKTSVDCTMYICGDSTECSNLLLQYGSFCTQLNRALTGIAVEQDKNTQEVFAQVKQIYKTPPIKDFGGFNFS
QILPDPSKPSKRSFIEDLLFNKVTLADAGFIKQYGDCLGDIAARDLICAQKFNGLTVLPPLLTDEMIAQYTSALLAGTITSG
WTFGAGPALQIPFAMQMAYRFNGIGVTQNVLYENQKLIANQFNSAIGKIQDSLSSTASALGKLQDVVNQNAQALNTL
VKQLSSNFGAISSVLNDILSRLDPPEAEVQIDRLITGRLQSLQTYVTQQLIRAAEIRASANLAATKMSECVLGQSKRVDFC
GKGYHLMSFPQSAPHGVVFLHVTYVPAQEKNFTTAPAICHDGKAHFPREGVFVSNGTHWFVTQRNFYEPQIITTDNTF
VSGNCDVVIGIVNNTVYDPLQPELDSFKEELDKYFKNHTSPDVDLGDISGINASVVNIQKEIDRLNEVAKNLNESLIDLQE
LGKYEQGSGYIPEAPRDGQAYVRKDGEWVLLSTFLGRSLEVLFQGPGSLPETGGGSDYKDDDDKGGGGSGGGGSGGG
GSGGGGSGGGGSHHHHHH
SEQ ID NO 14: SEQ ID NO 3 + D614N
MFVFLVLLPLVSSQCVNLTTRTQLPPAYTNSFTRGVYYPDKVFRSSVLHSTQDLFLPFFSNVTWFHAIHVSGTNGTKRFD
NPVLPFNDGVYFASTEKSNIIRGWIFGTTLDSKTQSLLIVNNATNVVIKVCEFQFCNDPFLGVYYHKNNKSWMESEFRVY
SSANNCTFEYVSQPFLMDLEGKQGNFKNLREFVFKNIDGYFKIYSKHTPINLVRDLPQGFSALEPLVDLPIGINITRFQTLL
ALHRSYLTPGDSSSGWTAGAAAYYVGYLQPRTFLLKYNENGTITDAVDCALDPLSETKCTLKSFTVEKGIYQTSNFRVQP
TESIVRFPNITNLCPFGEVFNATRFASVYAWNRKRISNCVADYSVLYNSASFSTFKCYGVSPTKLNDLCFTNVYADSFVIR
GDEVRQIAPGQTGKIADYNYKLPDDFTGCVIAWNSNNLDSKVGGNYNYLYRLFRKSNLKPFERDISTEIYQAGSTPCNG
VEGFNCYFPLQSYGFQPTNGVGYQPYRVVVLSFELLHAPATVCGPKKSTNLVKNKCVNFNFNGLTGTGVLTESNKKFLP
FQQFGRDIADTTDAVRDPQTLEILDITPCSFGGVSVITPGTNTSNQVAVLYQNVNCTEVPVAIHADQLTPTWRVYSTGS
NVFQTRAGCLIGAEHVNNSYECDIPIGAGICASYQTQTNSPSRAGSVASQSIIAYTMSLGAENSVAYSNNSIAIPTNFTISV
TTEILPVSMTKTSVDCTMYICGDSTECSNLLLQYGSFCTQLNRALTGIAVEQDKNTQEVFAQVKQIYKTPPIKDFGGFNFS
QILPDPSKPSKRSFIEDLLFNKVTLADAGFIKQYGDCLGDIAARDLICAQKFNGLTVLPPLLTDEMIAQYTSALLAGTITSG
WTFGAGAALQIPFAMQMAYRFNGIGVTQNVLYENQKLIANQFNSAIGKIQDSLSSTASALGKLQDVVNQNAQALNTL
VKQLSSNFGAISSVLNDILSRLDPPEAEVQIDRLITGRLQSLQTYVTQQLIRAAEIRASANLAATKMSECVLGQSKRVDFC
GKGYHLMSFPQSAPHGVVFLHVTYVPAQEKNFTTAPAICHDGKAHFPREGVFVSNGTHWFVTQRNFYEPQIITTDNTF
VSGNCDVVIGIVNNTVYDPLQPELDSFKEELDKYFKNHTSPDVDLGDISGINASVVNIQKEIDRLNEVAKNLNESLIDLQE
LGKYEQGSGYIPEAPRDGQAYVRKDGEWVLLSTFLGRSLEVLFQGPGSLPETGGGSDYKDDDDKGGGGSGGGGSGGG
GSGGGGSGGGGSHHHHHH
SEQ ID NO 15: SEQ ID NO 3 + T572I
MFVFLVLLPLVSSQCVNLTTRTQLPPAYTNSFTRGVYYPDKVFRSSVLHSTQDLFLPFFSNVTWFHAIHVSGTNGTKRFD
NPVLPFNDGVYFASTEKSNIIRGWIFGTTLDSKTQSLLIVNNATNVVIKVCEFQFCNDPFLGVYYHKNNKSWMESEFRVY
SSANNCTFEYVSQPFLMDLEGKQGNFKNLREFVFKNIDGYFKIYSKHTPINLVRDLPQGFSALEPLVDLPIGINITRFQTLL
ALHRSYLTPGDSSSGWTAGAAAYYVGYLQPRTFLLKYNENGTITDAVDCALDPLSETKCTLKSFTVEKGIYQTSNFRVQP
TESIVRFPNITNLCPFGEVFNATRFASVYAWNRKRISNCVADYSVLYNSASFSTFKCYGVSPTKLNDLCFTNVYADSFVIR
GDEVRQIAPGQTGKIADYNYKLPDDFTGCVIAWNSNNLDSKVGGNYNYLYRLFRKSNLKPFERDISTEIYQAGSTPCNG
VEGFNCYFPLQSYGFQPTNGVGYQPYRVVVLSFELLHAPATVCGPKKSTNLVKNKCVNFNFNGLTGTGVLTESNKKFLP
FQQFGRDIADITDAVRDPQTLEILDITPCSFGGVSVITPGTNTSNQVAVLYQDVNCTEVPVAIHADQLTPTWRVYSTGS
NVFQTRAGCLIGAEHVNNSYECDIPIGAGICASYQTQTNSPSRAGSVASQSIIAYTMSLGAENSVAYSNNSIAIPTNFTISV
TTEILPVSMTKTSVDCTMYICGDSTECSNLLLQYGSFCTQLNRALTGIAVEQDKNTQEVFAQVKQIYKTPPIKDFGGFNFS
QILPDPSKPSKRSFIEDLLFNKVTLADAGFIKQYGDCLGDIAARDLICAQKFNGLTVLPPLLTDEMIAQYTSALLAGTITSG
WTFGAGAALQIPFAMQMAYRFNGIGVTQNVLYENQKLIANQFNSAIGKIQDSLSSTASALGKLQDVVNQNAQALNTL
VKQLSSNFGAISSVLNDILSRLDPPEAEVQIDRLITGRLQSLQTYVTQQLIRAAEIRASANLAATKMSECVLGQSKRVDFC
GKGYHLMSFPQSAPHGVVFLHVTYVPAQEKNFTTAPAICHDGKAHFPREGVFVSNGTHWFVTQRNFYEPQIITTDNTF
VSGNCDVVIGIVNNTVYDPLQPELDSFKEELDKYFKNHTSPDVDLGDISGINASVVNIQKEIDRLNEVAKNLNESLIDLQE
LGKYEQGSGYIPEAPRDGQAYVRKDGEWVLLSTFLGRSLEVLFQGPGSLPETGGGSDYKDDDDKGGGGSGGGGSGGG
GSGGGGSGGGGSHHHHHH
SEQ ID NO 16: SEQ ID NO 3 + N532P
MFVFLVLLPLVSSQCVNLTTRTQLPPAYTNSFTRGVYYPDKVFRSSVLHSTQDLFLPFFSNVTWFHAIHVSGTNGTKRFD
NPVLPFNDGVYFASTEKSNIIRGWIFGTTLDSKTQSLLIVNNATNVVIKVCEFQFCNDPFLGVYYHKNNKSWMESEFRVY
SSANNCTFEYVSQPFLMDLEGKQGNFKNLREFVFKNIDGYFKIYSKHTPINLVRDLPQGFSALEPLVDLPIGINITRFQTLL
ALHRSYLTPGDSSSGWTAGAAAYYVGYLQPRTFLLKYNENGTITDAVDCALDPLSETKCTLKSFTVEKGIYQTSNFRVQP
TESIVRFPNITNLCPFGEVFNATRFASVYAWNRKRISNCVADYSVLYNSASFSTFKCYGVSPTKLNDLCFTNVYADSFVIR
GDEVRQIAPGQTGKIADYNYKLPDDFTGCVIAWNSNNLDSKVGGNYNYLYRLFRKSNLKPFERDISTEIYQAGSTPCNG
VEGFNCYFPLQSYGFQPTNGVGYQPYRVVVLSFELLHAPATVCGPKKSTPLVKNKCVNFNFNGLTGTGVLTESNKKFLP
FQQFGRDIADTTDAVRDPQTLEILDITPCSFGGVSVITPGTNTSNQVAVLYQDVNCTEVPVAIHADQLTPTWRVYSTGS
NVFQTRAGCLIGAEHVNNSYECDIPIGAGICASYQTQTNSPSRAGSVASQSIIAYTMSLGAENSVAYSNNSIAIPTNFTISV
TTEILPVSMTKTSVDCTMYICGDSTECSNLLLQYGSFCTQLNRALTGIAVEQDKNTQEVFAQVKQIYKTPPIKDFGGFNFS
QILPDPSKPSKRSFIEDLLFNKVTLADAGFIKQYGDCLGDIAARDLICAQKFNGLTVLPPLLTDEMIAQYTSALLAGTITSG
WTFGAGAALQIPFAMQMAYRFNGIGVTQNVLYENQKLIANQFNSAIGKIQDSLSSTASALGKLQDVVNQNAQALNTL
VKQLSSNFGAISSVLNDILSRLDPPEAEVQIDRLITGRLQSLQTYVTQQLIRAAEIRASANLAATKMSECVLGQSKRVDFC
GKGYHLMSFPQSAPHGVVFLHVTYVPAQEKNFTTAPAICHDGKAHFPREGVFVSNGTHWFVTQRNFYEPQIITTDNTF
VSGNCDVVIGIVNNTVYDPLQPELDSFKEELDKYFKNHTSPDVDLGDISGINASVVNIQKEIDRLNEVAKNLNESLIDLQE
LGKYEQGSGYIPEAPRDGQAYVRKDGEWVLLSTFLGRSLEVLFQGPGSLPETGGGSDYKDDDDKGGGGSGGGGSGGG
GSGGGGSGGGGSHHHHHH
SEQ ID NO 17: SEQ ID NO 3 + G880C + F888C
MFVFLVLLPLVSSQCVNLTTRTQLPPAYTNSFTRGVYYPDKVFRSSVLHSTQDLFLPFFSNVTWFHAIHVSGTNGTKRFD
NPVLPFNDGVYFASTEKSNIIRGWIFGTTLDSKTQSLLIVNNATNVVIKVCEFQFCNDPFLGVYYHKNNKSWMESEFRVY
SSANNCTFEYVSQPFLMDLEGKQGNFKNLREFVFKNIDGYFKIYSKHTPINLVRDLPQGFSALEPLVDLPIGINITRFQTLL
ALHRSYLTPGDSSSGWTAGAAAYYVGYLQPRTFLLKYNENGTITDAVDCALDPLSETKCTLKSFTVEKGIYQTSNFRVQP
TESIVRFPNITNLCPFGEVFNATRFASVYAWNRKRISNCVADYSVLYNSASFSTFKCYGVSPTKLNDLCFTNVYADSFVIR
GDEVRQIAPGQTGKIADYNYKLPDDFTGCVIAWNSNNLDSKVGGNYNYLYRLFRKSNLKPFERDISTEIYQAGSTPCNG
VEGFNCYFPLQSYGFQPTNGVGYQPYRVVVLSFELLHAPATVCGPKKSTNLVKNKCVNFNFNGLTGTGVLTESNKKFLP
FQQFGRDIADTTDAVRDPQTLEILDITPCSFGGVSVITPGTNTSNQVAVLYQDVNCTEVPVAIHADQLTPTWRVYSTGS
NVFQTRAGCLIGAEHVNNSYECDIPIGAGICASYQTQTNSPSRAGSVASQSIIAYTMSLGAENSVAYSNNSIAIPTNFTISV
TTEILPVSMTKTSVDCTMYICGDSTECSNLLLQYGSFCTQLNRALTGIAVEQDKNTQEVFAQVKQIYKTPPIKDFGGFNFS
QILPDPSKPSKRSFIEDLLFNKVTLADAGFIKQYGDCLGDIAARDLICAQKFNGLTVLPPLLTDEMIAQYTSALLACTITSG
WTCGAGAALQIPFAMQMAYRFNGIGVTQNVLYENQKLIANQFNSAIGKIQDSLSSTASALGKLQDVVNQNAQALNTL
VKQLSSNFGAISSVLNDILSRLDPPEAEVQIDRLITGRLQSLQTYVTQQLIRAAEIRASANLAATKMSECVLGQSKRVDFC
GKGYHLMSFPQSAPHGVVFLHVTYVPAQEKNFTTAPAICHDGKAHFPREGVFVSNGTHWFVTQRNFYEPQIITTDNTF
VSGNCDVVIGIVNNTVYDPLQPELDSFKEELDKYFKNHTSPDVDLGDISGINASVVNIQKEIDRLNEVAKNLNESLIDLQE
LGKYEQGSGYIPEAPRDGQAYVRKDGEWVLLSTFLGRSLEVLFQGPGSLPETGGGSDYKDDDDKGGGGSGGGGSGGG
GSGGGGSGGGGSHHHHHH
SEQ ID NO 18: SEQ ID NO 3 + S884C + A893C
MFVFLVLLPLVSSQCVNLTTRTQLPPAYTNSFTRGVYYPDKVFRSSVLHSTQDLFLPFFSNVTWFHAIHVSGTNGTKRFD
NPVLPFNDGVYFASTEKSNIIRGWIFGTTLDSKTQSLLIVNNATNVVIKVCEFQFCNDPFLGVYYHKNNKSWMESEFRVY
SSANNCTFEYVSQPFLMDLEGKQGNFKNLREFVFKNIDGYFKIYSKHTPINLVRDLPQGFSALEPLVDLPIGINITRFQTLL
ALHRSYLTPGDSSSGWTAGAAAYYVGYLQPRTFLLKYNENGTITDAVDCALDPLSETKCTLKSFTVEKGIYQTSNFRVQP
TESIVRFPNITNLCPFGEVFNATRFASVYAWNRKRISNCVADYSVLYNSASFSTFKCYGVSPTKLNDLCFTNVYADSFVIR
GDEVRQIAPGQTGKIADYNYKLPDDFTGCVIAWNSNNLDSKVGGNYNYLYRLFRKSNLKPFERDISTEIYQAGSTPCNG
VEGFNCYFPLQSYGFQPTNGVGYQPYRVVVLSFELLHAPATVCGPKKSTNLVKNKCVNFNFNGLTGTGVLTESNKKFLP
FQQFGRDIADTTDAVRDPQTLEILDITPCSFGGVSVITPGTNTSNQVAVLYQDVNCTEVPVAIHADQLTPTWRVYSTGS
NVFQTRAGCLIGAEHVNNSYECDIPIGAGICASYQTQTNSPSRAGSVASQSIIAYTMSLGAENSVAYSNNSIAIPTNFTISV
TTEILPVSMTKTSVDCTMYICGDSTECSNLLLQYGSFCTQLNRALTGIAVEQDKNTQEVFAQVKQIYKTPPIKDFGGFNFS
QILPDPSKPSKRSFIEDLLFNKVTLADAGFIKQYGDCLGDIAARDLICAQKFNGLTVLPPLLTDEMIAQYTSALLAGTITCG
WTFGAGACLQIPFAMQMAYRFNGIGVTQNVLYENQKLIANQFNSAIGKIQDSLSSTASALGKLQDVVNQNAQALNTL
VKQLSSNFGAISSVLNDILSRLDPPEAEVQIDRLITGRLQSLQTYVTQQLIRAAEIRASANLAATKMSECVLGQSKRVDFC
GKGYHLMSFPQSAPHGVVFLHVTYVPAQEKNFTTAPAICHDGKAHFPREGVFVSNGTHWFVTQRNFYEPQIITTDNTF
VSGNCDVVIGIVNNTVYDPLQPELDSFKEELDKYFKNHTSPDVDLGDISGINASVVNIQKEIDRLNEVAKNLNESLIDLQE
LGKYEQGSGYIPEAPRDGQAYVRKDGEWVLLSTFLGRSLEVLFQGPGSLPETGGGSDYKDDDDKGGGGSGGGGSGGG
GSGGGGSGGGGSHHHHHH
SEQ ID NO 19: SEQ ID NO 2 + A942P + A892P
MFVFLVLLPLVSSQCVNLTTRTQLPPAYTNSFTRGVYYPDKVFRSSVLHSTQDLFLPFFSNVTWFHAIHVSGTNGTKRFD
NPVLPFNDGVYFASTEKSNIIRGWIFGTTLDSKTQSLLIVNNATNVVIKVCEFQFCNDPFLGVYYHKNNKSWMESEFRVY
SSANNCTFEYVSQPFLMDLEGKQGNFKNLREFVFKNIDGYFKIYSKHTPINLVRDLPQGFSALEPLVDLPIGINITRFQTLL
ALHRSYLTPGDSSSGWTAGAAAYYVGYLQPRTFLLKYNENGTITDAVDCALDPLSETKCTLKSFTVEKGIYQTSNFRVQP
TESIVRFPNITNLCPFGEVFNATRFASVYAWNRKRISNCVADYSVLYNSASFSTFKCYGVSPTKLNDLCFTNVYADSFVIR
GDEVRQIAPGQTGKIADYNYKLPDDFTGCVIAWNSNNLDSKVGGNYNYLYRLFRKSNLKPFERDISTEIYQAGSTPCNG
VEGFNCYFPLQSYGFQPTNGVGYQPYRVVVLSFELLHAPATVCGPKKSTNLVKNKCVNFNFNGLTGTGVLTESNKKFLP
FQQFGRDIADTTDAVRDPQTLEILDITPCSFGGVSVITPGTNTSNQVAVLYQDVNCTEVPVAIHADQLTPTWRVYSTGS
NVFQTRAGCLIGAEHVNNSYECDIPIGAGICASYQTQTNSPSRAGSVASQSIIAYTMSLGAENSVAYSNNSIAIPTNFTISV
TTEILPVSMTKTSVDCTMYICGDSTECSNLLLQYGSFCTQLNRALTGIAVEQDKNTQEVFAQVKQIYKTPPIKDFGGFNFS
QILPDPSKPSKRSFIEDLLFNKVTLADAGFIKQYGDCLGDIAARDLICAQKFNGLTVLPPLLTDEMIAQYTSALLAGTITSG
WTFGAGPALQIPFAMQMAYRFNGIGVTQNVLYENQKLIANQFNSAIGKIQDSLSSTPSALGKLQDVVNQNAQALNTL
VKQLSSNFGAISSVLNDILSRLDKVEAEVQIDRLITGRLQSLQTYVTQQLIRAAEIRASANLAATKMSECVLGQSKRVDFC
GKGYHLMSFPQSAPHGVVFLHVTYVPAQEKNFTTAPAICHDGKAHFPREGVFVSNGTHWFVTQRNFYEPQIITTDNTF
VSGNCDVVIGIVNNTVYDPLQPELDSFKEELDKYFKNHTSPDVDLGDISGINASVVNIQKEIDRLNEVAKNLNESLIDLQE
LGKYEQGSGYIPEAPRDGQAYVRKDGEWVLLSTFLGRSLEVLFQGPGSLPETGGGSDYKDDDDKGGGGSGGGGSGGG
GSGGGGSGGGGSHHHHHH
SEQ ID NO 20: SEQ ID NO 2 + A942P + D614N
MFVFLVLLPLVSSQCVNLTTRTQLPPAYTNSFTRGVYYPDKVFRSSVLHSTQDLFLPFFSNVTWFHAIHVSGTNGTKRFD
NPVLPFNDGVYFASTEKSNIIRGWIFGTTLDSKTQSLLIVNNATNVVIKVCEFQFCNDPFLGVYYHKNNKSWMESEFRVY
SSANNCTFEYVSQPFLMDLEGKQGNFKNLREFVFKNIDGYFKIYSKHTPINLVRDLPQGFSALEPLVDLPIGINITRFQTLL
ALHRSYLTPGDSSSGWTAGAAAYYVGYLQPRTFLLKYNENGTITDAVDCALDPLSETKCTLKSFTVEKGIYQTSNFRVQP
TESIVRFPNITNLCPFGEVFNATRFASVYAWNRKRISNCVADYSVLYNSASFSTFKCYGVSPTKLNDLCFTNVYADSFVIR
GDEVRQIAPGQTGKIADYNYKLPDDFTGCVIAWNSNNLDSKVGGNYNYLYRLFRKSNLKPFERDISTEIYQAGSTPCNG
VEGFNCYFPLQSYGFQPTNGVGYQPYRVVVLSFELLHAPATVCGPKKSTNLVKNKCVNFNFNGLTGTGVLTESNKKFLP
FQQFGRDIADTTDAVRDPQTLEILDITPCSFGGVSVITPGTNTSNQVAVLYQNVNCTEVPVAIHADQLTPTWRVYSTGS
NVFQTRAGCLIGAEHVNNSYECDIPIGAGICASYQTQTNSPSRAGSVASQSIIAYTMSLGAENSVAYSNNSIAIPTNFTISV
TTEILPVSMTKTSVDCTMYICGDSTECSNLLLQYGSFCTQLNRALTGIAVEQDKNTQEVFAQVKQIYKTPPIKDFGGFNFS
QILPDPSKPSKRSFIEDLLFNKVTLADAGFIKQYGDCLGDIAARDLICAQKFNGLTVLPPLLTDEMIAQYTSALLAGTITSG
WTFGAGAALQIPFAMQMAYRFNGIGVTQNVLYENQKLIANQFNSAIGKIQDSLSSTPSALGKLQDVVNQNAQALNTL
VKQLSSNFGAISSVLNDILSRLDKVEAEVQIDRLITGRLQSLQTYVTQQLIRAAEIRASANLAATKMSECVLGQSKRVDFC
GKGYHLMSFPQSAPHGVVFLHVTYVPAQEKNFTTAPAICHDGKAHFPREGVFVSNGTHWFVTQRNFYEPQIITTDNTF
VSGNCDVVIGIVNNTVYDPLQPELDSFKEELDKYFKNHTSPDVDLGDISGINASVVNIQKEIDRLNEVAKNLNESLIDLQE
LGKYEQGSGYIPEAPRDGQAYVRKDGEWVLLSTFLGRSLEVLFQGPGSLPETGGGSDYKDDDDKGGGGSGGGGSGGG
GSGGGGSGGGGSHHHHHH
SEQ ID NO 21: SEQ ID NO 2 + A942P + T572I
MFVFLVLLPLVSSQCVNLTTRTQLPPAYTNSFTRGVYYPDKVFRSSVLHSTQDLFLPFFSNVTWFHAIHVSGTNGTKRFD
NPVLPFNDGVYFASTEKSNIIRGWIFGTTLDSKTQSLLIVNNATNVVIKVCEFQFCNDPFLGVYYHKNNKSWMESEFRVY
SSANNCTFEYVSQPFLMDLEGKQGNFKNLREFVFKNIDGYFKIYSKHTPINLVRDLPQGFSALEPLVDLPIGINITRFQTLL
ALHRSYLTPGDSSSGWTAGAAAYYVGYLQPRTFLLKYNENGTITDAVDCALDPLSETKCTLKSFTVEKGIYQTSNFRVQP
TESIVRFPNITNLCPFGEVFNATRFASVYAWNRKRISNCVADYSVLYNSASFSTFKCYGVSPTKLNDLCFTNVYADSFVIR
GDEVRQIAPGQTGKIADYNYKLPDDFTGCVIAWNSNNLDSKVGGNYNYLYRLFRKSNLKPFERDISTEIYQAGSTPCNG
VEGFNCYFPLQSYGFQPTNGVGYQPYRVVVLSFELLHAPATVCGPKKSTNLVKNKCVNFNFNGLTGTGVLTESNKKFLP
FQQFGRDIADITDAVRDPQTLEILDITPCSFGGVSVITPGTNTSNQVAVLYQDVNCTEVPVAIHADQLTPTWRVYSTGS
NVFQTRAGCLIGAEHVNNSYECDIPIGAGICASYQTQTNSPSRAGSVASQSIIAYTMSLGAENSVAYSNNSIAIPTNFTISV
TTEILPVSMTKTSVDCTMYICGDSTECSNLLLQYGSFCTQLNRALTGIAVEQDKNTQEVFAQVKQIYKTPPIKDFGGFNFS
QILPDPSKPSKRSFIEDLLFNKVTLADAGFIKQYGDCLGDIAARDLICAQKFNGLTVLPPLLTDEMIAQYTSALLAGTITSG
WTFGAGAALQIPFAMQMAYRFNGIGVTQNVLYENQKLIANQFNSAIGKIQDSLSSTPSALGKLQDVVNQNAQALNTL
VKQLSSNFGAISSVLNDILSRLDKVEAEVQIDRLITGRLQSLQTYVTQQLIRAAEIRASANLAATKMSECVLGQSKRVDFC
GKGYHLMSFPQSAPHGVVFLHVTYVPAQEKNFTTAPAICHDGKAHFPREGVFVSNGTHWFVTQRNFYEPQIITTDNTF
VSGNCDVVIGIVNNTVYDPLQPELDSFKEELDKYFKNHTSPDVDLGDISGINASVVNIQKEIDRLNEVAKNLNESLIDLQE
LGKYEQGSGYIPEAPRDGQAYVRKDGEWVLLSTFLGRSLEVLFQGPGSLPETGGGSDYKDDDDKGGGGSGGGGSGGG
GSGGGGSGGGGSHHHHHH
SEQ ID NO 22: SEQ ID NO 2 + A942P + N532P
MFVFLVLLPLVSSQCVNLTTRTQLPPAYTNSFTRGVYYPDKVFRSSVLHSTQDLFLPFFSNVTWFHAIHVSGTNGTKRFD
NPVLPFNDGVYFASTEKSNIIRGWIFGTTLDSKTQSLLIVNNATNVVIKVCEFQFCNDPFLGVYYHKNNKSWMESEFRVY
SSANNCTFEYVSQPFLMDLEGKQGNFKNLREFVFKNIDGYFKIYSKHTPINLVRDLPQGFSALEPLVDLPIGINITRFQTLL
ALHRSYLTPGDSSSGWTAGAAAYYVGYLQPRTFLLKYNENGTITDAVDCALDPLSETKCTLKSFTVEKGIYQTSNFRVQP
TESIVRFPNITNLCPFGEVFNATRFASVYAWNRKRISNCVADYSVLYNSASFSTFKCYGVSPTKLNDLCFTNVYADSFVIR
GDEVRQIAPGQTGKIADYNYKLPDDFTGCVIAWNSNNLDSKVGGNYNYLYRLFRKSNLKPFERDISTEIYQAGSTPCNG
VEGFNCYFPLQSYGFQPTNGVGYQPYRVVVLSFELLHAPATVCGPKKSTPLVKNKCVNFNFNGLTGTGVLTESNKKFLP
FQQFGRDIADTTDAVRDPQTLEILDITPCSFGGVSVITPGTNTSNQVAVLYQDVNCTEVPVAIHADQLTPTWRVYSTGS
NVFQTRAGCLIGAEHVNNSYECDIPIGAGICASYQTQTNSPSRAGSVASQSIIAYTMSLGAENSVAYSNNSIAIPTNFTISV
TTEILPVSMTKTSVDCTMYICGDSTECSNLLLQYGSFCTQLNRALTGIAVEQDKNTQEVFAQVKQIYKTPPIKDFGGFNFS
QILPDPSKPSKRSFIEDLLFNKVTLADAGFIKQYGDCLGDIAARDLICAQKFNGLTVLPPLLTDEMIAQYTSALLAGTITSG
WTFGAGAALQIPFAMQMAYRFNGIGVTQNVLYENQKLIANQFNSAIGKIQDSLSSTPSALGKLQDVVNQNAQALNTL
VKQLSSNFGAISSVLNDILSRLDKVEAEVQIDRLITGRLQSLQTYVTQQLIRAAEIRASANLAATKMSECVLGQSKRVDFC
GKGYHLMSFPQSAPHGVVFLHVTYVPAQEKNFTTAPAICHDGKAHFPREGVFVSNGTHWFVTQRNFYEPQIITTDNTF
VSGNCDVVIGIVNNTVYDPLQPELDSFKEELDKYFKNHTSPDVDLGDISGINASVVNIQKEIDRLNEVAKNLNESLIDLQE
LGKYEQGSGYIPEAPRDGQAYVRKDGEWVLLSTFLGRSLEVLFQGPGSLPETGGGSDYKDDDDKGGGGSGGGGSGGG
GSGGGGSGGGGSHHHHHH
SEQ ID NO 23: SEQ ID NO 2 + A942P + G880C + F888C
MFVFLVLLPLVSSQCVNLTTRTQLPPAYTNSFTRGVYYPDKVFRSSVLHSTQDLFLPFFSNVTWFHAIHVSGTNGTKRFD
NPVLPFNDGVYFASTEKSNIIRGWIFGTTLDSKTQSLLIVNNATNVVIKVCEFQFCNDPFLGVYYHKNNKSWMESEFRVY
SSANNCTFEYVSQPFLMDLEGKQGNFKNLREFVFKNIDGYFKIYSKHTPINLVRDLPQGFSALEPLVDLPIGINITRFQTLL
ALHRSYLTPGDSSSGWTAGAAAYYVGYLQPRTFLLKYNENGTITDAVDCALDPLSETKCTLKSFTVEKGIYQTSNFRVQP
TESIVRFPNITNLCPFGEVFNATRFASVYAWNRKRISNCVADYSVLYNSASFSTFKCYGVSPTKLNDLCFTNVYADSFVIR
GDEVRQIAPGQTGKIADYNYKLPDDFTGCVIAWNSNNLDSKVGGNYNYLYRLFRKSNLKPFERDISTEIYQAGSTPCNG
VEGFNCYFPLQSYGFQPTNGVGYQPYRVVVLSFELLHAPATVCGPKKSTNLVKNKCVNFNFNGLTGTGVLTESNKKFLP
FQQFGRDIADTTDAVRDPQTLEILDITPCSFGGVSVITPGTNTSNQVAVLYQDVNCTEVPVAIHADQLTPTWRVYSTGS
NVFQTRAGCLIGAEHVNNSYECDIPIGAGICASYQTQTNSPSRAGSVASQSIIAYTMSLGAENSVAYSNNSIAIPTNFTISV
TTEILPVSMTKTSVDCTMYICGDSTECSNLLLQYGSFCTQLNRALTGIAVEQDKNTQEVFAQVKQIYKTPPIKDFGGFNFS
QILPDPSKPSKRSFIEDLLFNKVTLADAGFIKQYGDCLGDIAARDLICAQKFNGLTVLPPLLTDEMIAQYTSALLACTITSG
WTCGAGAALQIPFAMQMAYRFNGIGVTQNVLYENQKLIANQFNSAIGKIQDSLSSTPSALGKLQDVVNQNAQALNTL
VKQLSSNFGAISSVLNDILSRLDKVEAEVQIDRLITGRLQSLQTYVTQQLIRAAEIRASANLAATKMSECVLGQSKRVDFC
GKGYHLMSFPQSAPHGVVFLHVTYVPAQEKNFTTAPAICHDGKAHFPREGVFVSNGTHWFVTQRNFYEPQIITTDNTF
VSGNCDVVIGIVNNTVYDPLQPELDSFKEELDKYFKNHTSPDVDLGDISGINASVVNIQKEIDRLNEVAKNLNESLIDLQE
LGKYEQGSGYIPEAPRDGQAYVRKDGEWVLLSTFLGRSLEVLFQGPGSLPETGGGSDYKDDDDKGGGGSGGGGSGGG
GSGGGGSGGGGSHHHHHH
SEQ ID NO 24: SEQ ID NO 2 + A942P + S884C + A893C
MFVFLVLLPLVSSQCVNLTTRTQLPPAYTNSFTRGVYYPDKVFRSSVLHSTQDLFLPFFSNVTWFHAIHVSGTNGTKRFD
NPVLPFNDGVYFASTEKSNIIRGWIFGTTLDSKTQSLLIVNNATNVVIKVCEFQFCNDPFLGVYYHKNNKSWMESEFRVY
SSANNCTFEYVSQPFLMDLEGKQGNFKNLREFVFKNIDGYFKIYSKHTPINLVRDLPQGFSALEPLVDLPIGINITRFQTLL
ALHRSYLTPGDSSSGWTAGAAAYYVGYLQPRTFLLKYNENGTITDAVDCALDPLSETKCTLKSFTVEKGIYQTSNFRVQP
TESIVRFPNITNLCPFGEVFNATRFASVYAWNRKRISNCVADYSVLYNSASFSTFKCYGVSPTKLNDLCFTNVYADSFVIR
GDEVRQIAPGQTGKIADYNYKLPDDFTGCVIAWNSNNLDSKVGGNYNYLYRLFRKSNLKPFERDISTEIYQAGSTPCNG
VEGFNCYFPLQSYGFQPTNGVGYQPYRVVVLSFELLHAPATVCGPKKSTNLVKNKCVNFNFNGLTGTGVLTESNKKFLP
FQQFGRDIADTTDAVRDPQTLEILDITPCSFGGVSVITPGTNTSNQVAVLYQDVNCTEVPVAIHADQLTPTWRVYSTGS
NVFQTRAGCLIGAEHVNNSYECDIPIGAGICASYQTQTNSPSRAGSVASQSIIAYTMSLGAENSVAYSNNSIAIPTNFTISV
TTEILPVSMTKTSVDCTMYICGDSTECSNLLLQYGSFCTQLNRALTGIAVEQDKNTQEVFAQVKQIYKTPPIKDFGGFNFS
QILPDPSKPSKRSFIEDLLFNKVTLADAGFIKQYGDCLGDIAARDLICAQKFNGLTVLPPLLTDEMIAQYTSALLAGTITCG
WTFGAGACLQIPFAMQMAYRFNGIGVTQNVLYENQKLIANQFNSAIGKIQDSLSSTPSALGKLQDVVNQNAQALNTL
VKQLSSNFGAISSVLNDILSRLDKVEAEVQIDRLITGRLQSLQTYVTQQLIRAAEIRASANLAATKMSECVLGQSKRVDFC
GKGYHLMSFPQSAPHGVVFLHVTYVPAQEKNFTTAPAICHDGKAHFPREGVFVSNGTHWFVTQRNFYEPQIITTDNTF
VSGNCDVVIGIVNNTVYDPLQPELDSFKEELDKYFKNHTSPDVDLGDISGINASVVNIQKEIDRLNEVAKNLNESLIDLQE
LGKYEQGSGYIPEAPRDGQAYVRKDGEWVLLSTFLGRSLEVLFQGPGSLPETGGGSDYKDDDDKGGGGSGGGGSGGG
GSGGGGSGGGGSHHHHHH
SEQ ID NO 25: SEQ ID NO 2 + A892P + D614N
MFVFLVLLPLVSSQCVNLTTRTQLPPAYTNSFTRGVYYPDKVFRSSVLHSTQDLFLPFFSNVTWFHAIHVSGTNGTKRFD
NPVLPFNDGVYFASTEKSNIIRGWIFGTTLDSKTQSLLIVNNATNVVIKVCEFQFCNDPFLGVYYHKNNKSWMESEFRVY
SSANNCTFEYVSQPFLMDLEGKQGNFKNLREFVFKNIDGYFKIYSKHTPINLVRDLPQGFSALEPLVDLPIGINITRFQTLL
ALHRSYLTPGDSSSGWTAGAAAYYVGYLQPRTFLLKYNENGTITDAVDCALDPLSETKCTLKSFTVEKGIYQTSNFRVQP
TESIVRFPNITNLCPFGEVFNATRFASVYAWNRKRISNCVADYSVLYNSASFSTFKCYGVSPTKLNDLCFTNVYADSFVIR
GDEVRQIAPGQTGKIADYNYKLPDDFTGCVIAWNSNNLDSKVGGNYNYLYRLFRKSNLKPFERDISTEIYQAGSTPCNG
VEGFNCYFPLQSYGFQPTNGVGYQPYRVVVLSFELLHAPATVCGPKKSTNLVKNKCVNFNFNGLTGTGVLTESNKKFLP
FQQFGRDIADTTDAVRDPQTLEILDITPCSFGGVSVITPGTNTSNQVAVLYQNVNCTEVPVAIHADQLTPTWRVYSTGS
NVFQTRAGCLIGAEHVNNSYECDIPIGAGICASYQTQTNSPSRAGSVASQSIIAYTMSLGAENSVAYSNNSIAIPTNFTISV
TTEILPVSMTKTSVDCTMYICGDSTECSNLLLQYGSFCTQLNRALTGIAVEQDKNTQEVFAQVKQIYKTPPIKDFGGFNFS
QILPDPSKPSKRSFIEDLLFNKVTLADAGFIKQYGDCLGDIAARDLICAQKFNGLTVLPPLLTDEMIAQYTSALLAGTITSG
WTFGAGPALQIPFAMQMAYRFNGIGVTQNVLYENQKLIANQFNSAIGKIQDSLSSTASALGKLQDVVNQNAQALNTL
VKQLSSNFGAISSVLNDILSRLDKVEAEVQIDRLITGRLQSLQTYVTQQLIRAAEIRASANLAATKMSECVLGQSKRVDFC
GKGYHLMSFPQSAPHGVVFLHVTYVPAQEKNFTTAPAICHDGKAHFPREGVFVSNGTHWFVTQRNFYEPQIITTDNTF
VSGNCDVVIGIVNNTVYDPLQPELDSFKEELDKYFKNHTSPDVDLGDISGINASVVNIQKEIDRLNEVAKNLNESLIDLQE
LGKYEQGSGYIPEAPRDGQAYVRKDGEWVLLSTFLGRSLEVLFQGPGSLPETGGGSDYKDDDDKGGGGSGGGGSGGG
GSGGGGSGGGGSHHHHHH
SEQ ID NO 26: SEQ ID NO 2 + A892P + T572I
MFVFLVLLPLVSSQCVNLTTRTQLPPAYTNSFTRGVYYPDKVFRSSVLHSTQDLFLPFFSNVTWFHAIHVSGTNGTKRFD
NPVLPFNDGVYFASTEKSNIIRGWIFGTTLDSKTQSLLIVNNATNVVIKVCEFQFCNDPFLGVYYHKNNKSWMESEFRVY
SSANNCTFEYVSQPFLMDLEGKQGNFKNLREFVFKNIDGYFKIYSKHTPINLVRDLPQGFSALEPLVDLPIGINITRFQTLL
ALHRSYLTPGDSSSGWTAGAAAYYVGYLQPRTFLLKYNENGTITDAVDCALDPLSETKCTLKSFTVEKGIYQTSNFRVQP
TESIVRFPNITNLCPFGEVFNATRFASVYAWNRKRISNCVADYSVLYNSASFSTFKCYGVSPTKLNDLCFTNVYADSFVIR
GDEVRQIAPGQTGKIADYNYKLPDDFTGCVIAWNSNNLDSKVGGNYNYLYRLFRKSNLKPFERDISTEIYQAGSTPCNG
VEGFNCYFPLQSYGFQPTNGVGYQPYRVVVLSFELLHAPATVCGPKKSTNLVKNKCVNFNFNGLTGTGVLTESNKKFLP
FQQFGRDIADITDAVRDPQTLEILDITPCSFGGVSVITPGTNTSNQVAVLYQDVNCTEVPVAIHADQLTPTWRVYSTGS
NVFQTRAGCLIGAEHVNNSYECDIPIGAGICASYQTQTNSPSRAGSVASQSIIAYTMSLGAENSVAYSNNSIAIPTNFTISV
TTEILPVSMTKTSVDCTMYICGDSTECSNLLLQYGSFCTQLNRALTGIAVEQDKNTQEVFAQVKQIYKTPPIKDFGGFNFS
QILPDPSKPSKRSFIEDLLFNKVTLADAGFIKQYGDCLGDIAARDLICAQKFNGLTVLPPLLTDEMIAQYTSALLAGTITSG
WTFGAGPALQIPFAMQMAYRFNGIGVTQNVLYENQKLIANQFNSAIGKIQDSLSSTASALGKLQDVVNQNAQALNTL
VKQLSSNFGAISSVLNDILSRLDKVEAEVQIDRLITGRLQSLQTYVTQQLIRAAEIRASANLAATKMSECVLGQSKRVDFC
GKGYHLMSFPQSAPHGVVFLHVTYVPAQEKNFTTAPAICHDGKAHFPREGVFVSNGTHWFVTQRNFYEPQIITTDNTF
VSGNCDVVIGIVNNTVYDPLQPELDSFKEELDKYFKNHTSPDVDLGDISGINASVVNIQKEIDRLNEVAKNLNESLIDLQE
LGKYEQGSGYIPEAPRDGQAYVRKDGEWVLLSTFLGRSLEVLFQGPGSLPETGGGSDYKDDDDKGGGGSGGGGSGGG
GSGGGGSGGGGSHHHHHH
SEQ ID NO 27: SEQ ID NO 2 + A892P + N532P
MFVFLVLLPLVSSQCVNLTTRTQLPPAYTNSFTRGVYYPDKVFRSSVLHSTQDLFLPFFSNVTWFHAIHVSGTNGTKRFD
NPVLPFNDGVYFASTEKSNIIRGWIFGTTLDSKTQSLLIVNNATNVVIKVCEFQFCNDPFLGVYYHKNNKSWMESEFRVY
SSANNCTFEYVSQPFLMDLEGKQGNFKNLREFVFKNIDGYFKIYSKHTPINLVRDLPQGFSALEPLVDLPIGINITRFQTLL
ALHRSYLTPGDSSSGWTAGAAAYYVGYLQPRTFLLKYNENGTITDAVDCALDPLSETKCTLKSFTVEKGIYQTSNFRVQP
TESIVRFPNITNLCPFGEVFNATRFASVYAWNRKRISNCVADYSVLYNSASFSTFKCYGVSPTKLNDLCFTNVYADSFVIR
GDEVRQIAPGQTGKIADYNYKLPDDFTGCVIAWNSNNLDSKVGGNYNYLYRLFRKSNLKPFERDISTEIYQAGSTPCNG
VEGFNCYFPLQSYGFQPTNGVGYQPYRVVVLSFELLHAPATVCGPKKSTPLVKNKCVNFNFNGLTGTGVLTESNKKFLP
FQQFGRDIADTTDAVRDPQTLEILDITPCSFGGVSVITPGTNTSNQVAVLYQDVNCTEVPVAIHADQLTPTWRVYSTGS
NVFQTRAGCLIGAEHVNNSYECDIPIGAGICASYQTQTNSPSRAGSVASQSIIAYTMSLGAENSVAYSNNSIAIPTNFTISV
TTEILPVSMTKTSVDCTMYICGDSTECSNLLLQYGSFCTQLNRALTGIAVEQDKNTQEVFAQVKQIYKTPPIKDFGGFNFS
QILPDPSKPSKRSFIEDLLFNKVTLADAGFIKQYGDCLGDIAARDLICAQKFNGLTVLPPLLTDEMIAQYTSALLAGTITSG
WTFGAGPALQIPFAMQMAYRFNGIGVTQNVLYENQKLIANQFNSAIGKIQDSLSSTASALGKLQDVVNQNAQALNTL
VKQLSSNFGAISSVLNDILSRLDKVEAEVQIDRLITGRLQSLQTYVTQQLIRAAEIRASANLAATKMSECVLGQSKRVDFC
GKGYHLMSFPQSAPHGVVFLHVTYVPAQEKNFTTAPAICHDGKAHFPREGVFVSNGTHWFVTQRNFYEPQIITTDNTF
VSGNCDVVIGIVNNTVYDPLQPELDSFKEELDKYFKNHTSPDVDLGDISGINASVVNIQKEIDRLNEVAKNLNESLIDLQE
LGKYEQGSGYIPEAPRDGQAYVRKDGEWVLLSTFLGRSLEVLFQGPGSLPETGGGSDYKDDDDKGGGGSGGGGSGGG
GSGGGGSGGGGSHHHHHH
SEQ ID NO 28: SEQ ID NO 2 + A892P + G880C + F888C
MFVFLVLLPLVSSQCVNLTTRTQLPPAYTNSFTRGVYYPDKVFRSSVLHSTQDLFLPFFSNVTWFHAIHVSGTNGTKRFD
NPVLPFNDGVYFASTEKSNIIRGWIFGTTLDSKTQSLLIVNNATNVVIKVCEFQFCNDPFLGVYYHKNNKSWMESEFRVY
SSANNCTFEYVSQPFLMDLEGKQGNFKNLREFVFKNIDGYFKIYSKHTPINLVRDLPQGFSALEPLVDLPIGINITRFQTLL
ALHRSYLTPGDSSSGWTAGAAAYYVGYLQPRTFLLKYNENGTITDAVDCALDPLSETKCTLKSFTVEKGIYQTSNFRVQP
TESIVRFPNITNLCPFGEVFNATRFASVYAWNRKRISNCVADYSVLYNSASFSTFKCYGVSPTKLNDLCFTNVYADSFVIR
GDEVRQIAPGQTGKIADYNYKLPDDFTGCVIAWNSNNLDSKVGGNYNYLYRLFRKSNLKPFERDISTEIYQAGSTPCNG
VEGFNCYFPLQSYGFQPTNGVGYQPYRVVVLSFELLHAPATVCGPKKSTNLVKNKCVNFNFNGLTGTGVLTESNKKFLP
FQQFGRDIADTTDAVRDPQTLEILDITPCSFGGVSVITPGTNTSNQVAVLYQDVNCTEVPVAIHADQLTPTWRVYSTGS
NVFQTRAGCLIGAEHVNNSYECDIPIGAGICASYQTQTNSPSRAGSVASQSIIAYTMSLGAENSVAYSNNSIAIPTNFTISV
TTEILPVSMTKTSVDCTMYICGDSTECSNLLLQYGSFCTQLNRALTGIAVEQDKNTQEVFAQVKQIYKTPPIKDFGGFNFS
QILPDPSKPSKRSFIEDLLFNKVTLADAGFIKQYGDCLGDIAARDLICAQKFNGLTVLPPLLTDEMIAQYTSALLACTITSG
WTCGAGPALQIPFAMQMAYRFNGIGVTQNVLYENQKLIANQFNSAIGKIQDSLSSTASALGKLQDVVNQNAQALNTL
VKQLSSNFGAISSVLNDILSRLDKVEAEVQIDRLITGRLQSLQTYVTQQLIRAAEIRASANLAATKMSECVLGQSKRVDFC
GKGYHLMSFPQSAPHGVVFLHVTYVPAQEKNFTTAPAICHDGKAHFPREGVFVSNGTHWFVTQRNFYEPQIITTDNTF
VSGNCDVVIGIVNNTVYDPLQPELDSFKEELDKYFKNHTSPDVDLGDISGINASVVNIQKEIDRLNEVAKNLNESLIDLQE
LGKYEQGSGYIPEAPRDGQAYVRKDGEWVLLSTFLGRSLEVLFQGPGSLPETGGGSDYKDDDDKGGGGSGGGGSGGG
GSGGGGSGGGGSHHHHHH
SEQ ID NO 29: SEQ ID NO 2 + A892P + S884C + A893C
MFVFLVLLPLVSSQCVNLTTRTQLPPAYTNSFTRGVYYPDKVFRSSVLHSTQDLFLPFFSNVTWFHAIHVSGTNGTKRFD
NPVLPFNDGVYFASTEKSNIIRGWIFGTTLDSKTQSLLIVNNATNVVIKVCEFQFCNDPFLGVYYHKNNKSWMESEFRVY
SSANNCTFEYVSQPFLMDLEGKQGNFKNLREFVFKNIDGYFKIYSKHTPINLVRDLPQGFSALEPLVDLPIGINITRFQTLL
ALHRSYLTPGDSSSGWTAGAAAYYVGYLQPRTFLLKYNENGTITDAVDCALDPLSETKCTLKSFTVEKGIYQTSNFRVQP
TESIVRFPNITNLCPFGEVFNATRFASVYAWNRKRISNCVADYSVLYNSASFSTFKCYGVSPTKLNDLCFTNVYADSFVIR
GDEVRQIAPGQTGKIADYNYKLPDDFTGCVIAWNSNNLDSKVGGNYNYLYRLFRKSNLKPFERDISTEIYQAGSTPCNG
VEGFNCYFPLQSYGFQPTNGVGYQPYRVVVLSFELLHAPATVCGPKKSTNLVKNKCVNFNFNGLTGTGVLTESNKKFLP
FQQFGRDIADTTDAVRDPQTLEILDITPCSFGGVSVITPGTNTSNQVAVLYQDVNCTEVPVAIHADQLTPTWRVYSTGS
NVFQTRAGCLIGAEHVNNSYECDIPIGAGICASYQTQTNSPSRAGSVASQSIIAYTMSLGAENSVAYSNNSIAIPTNFTISV
TTEILPVSMTKTSVDCTMYICGDSTECSNLLLQYGSFCTQLNRALTGIAVEQDKNTQEVFAQVKQIYKTPPIKDFGGFNFS
QILPDPSKPSKRSFIEDLLFNKVTLADAGFIKQYGDCLGDIAARDLICAQKFNGLTVLPPLLTDEMIAQYTSALLAGTITCG
WTFGAGPCLQIPFAMQMAYRFNGIGVTQNVLYENQKLIANQFNSAIGKIQDSLSSTASALGKLQDVVNQNAQALNTL
VKQLSSNFGAISSVLNDILSRLDKVEAEVQIDRLITGRLQSLQTYVTQQLIRAAEIRASANLAATKMSECVLGQSKRVDFC
GKGYHLMSFPQSAPHGVVFLHVTYVPAQEKNFTTAPAICHDGKAHFPREGVFVSNGTHWFVTQRNFYEPQIITTDNTF
VSGNCDVVIGIVNNTVYDPLQPELDSFKEELDKYFKNHTSPDVDLGDISGINASVVNIQKEIDRLNEVAKNLNESLIDLQE
LGKYEQGSGYIPEAPRDGQAYVRKDGEWVLLSTFLGRSLEVLFQGPGSLPETGGGSDYKDDDDKGGGGSGGGGSGGG
GSGGGGSGGGGSHHHHHH
SEQ ID NO 30: SEQ ID NO 2 + D614N + T572I
MFVFLVLLPLVSSQCVNLTTRTQLPPAYTNSFTRGVYYPDKVFRSSVLHSTQDLFLPFFSNVTWFHAIHVSGTNGTKRFD
NPVLPFNDGVYFASTEKSNIIRGWIFGTTLDSKTQSLLIVNNATNVVIKVCEFQFCNDPFLGVYYHKNNKSWMESEFRVY
SSANNCTFEYVSQPFLMDLEGKQGNFKNLREFVFKNIDGYFKIYSKHTPINLVRDLPQGFSALEPLVDLPIGINITRFQTLL
ALHRSYLTPGDSSSGWTAGAAAYYVGYLQPRTFLLKYNENGTITDAVDCALDPLSETKCTLKSFTVEKGIYQTSNFRVQP
TESIVRFPNITNLCPFGEVFNATRFASVYAWNRKRISNCVADYSVLYNSASFSTFKCYGVSPTKLNDLCFTNVYADSFVIR
GDEVRQIAPGQTGKIADYNYKLPDDFTGCVIAWNSNNLDSKVGGNYNYLYRLFRKSNLKPFERDISTEIYQAGSTPCNG
VEGFNCYFPLQSYGFQPTNGVGYQPYRVVVLSFELLHAPATVCGPKKSTNLVKNKCVNFNFNGLTGTGVLTESNKKFLP
FQQFGRDIADITDAVRDPQTLEILDITPCSFGGVSVITPGTNTSNQVAVLYQNVNCTEVPVAIHADQLTPTWRVYSTGS
NVFQTRAGCLIGAEHVNNSYECDIPIGAGICASYQTQTNSPSRAGSVASQSIIAYTMSLGAENSVAYSNNSIAIPTNFTISV
TTEILPVSMTKTSVDCTMYICGDSTECSNLLLQYGSFCTQLNRALTGIAVEQDKNTQEVFAQVKQIYKTPPIKDFGGFNFS
QILPDPSKPSKRSFIEDLLFNKVTLADAGFIKQYGDCLGDIAARDLICAQKFNGLTVLPPLLTDEMIAQYTSALLAGTITSG
WTFGAGAALQIPFAMQMAYRFNGIGVTQNVLYENQKLIANQFNSAIGKIQDSLSSTASALGKLQDVVNQNAQALNTL
VKQLSSNFGAISSVLNDILSRLDKVEAEVQIDRLITGRLQSLQTYVTQQLIRAAEIRASANLAATKMSECVLGQSKRVDFC
GKGYHLMSFPQSAPHGVVFLHVTYVPAQEKNFTTAPAICHDGKAHFPREGVFVSNGTHWFVTQRNFYEPQIITTDNTF
VSGNCDVVIGIVNNTVYDPLQPELDSFKEELDKYFKNHTSPDVDLGDISGINASVVNIQKEIDRLNEVAKNLNESLIDLQE
LGKYEQGSGYIPEAPRDGQAYVRKDGEWVLLSTFLGRSLEVLFQGPGSLPETGGGSDYKDDDDKGGGGSGGGGSGGG
GSGGGGSGGGGSHHHHHH
SEQ ID NO 31: SEQ ID NO 2 + D614N + N532P
MFVFLVLLPLVSSQCVNLTTRTQLPPAYTNSFTRGVYYPDKVFRSSVLHSTQDLFLPFFSNVTWFHAIHVSGTNGTKRFD
NPVLPFNDGVYFASTEKSNIIRGWIFGTTLDSKTQSLLIVNNATNVVIKVCEFQFCNDPFLGVYYHKNNKSWMESEFRVY
SSANNCTFEYVSQPFLMDLEGKQGNFKNLREFVFKNIDGYFKIYSKHTPINLVRDLPQGFSALEPLVDLPIGINITRFQTLL
ALHRSYLTPGDSSSGWTAGAAAYYVGYLQPRTFLLKYNENGTITDAVDCALDPLSETKCTLKSFTVEKGIYQTSNFRVQP
TESIVRFPNITNLCPFGEVFNATRFASVYAWNRKRISNCVADYSVLYNSASFSTFKCYGVSPTKLNDLCFTNVYADSFVIR
GDEVRQIAPGQTGKIADYNYKLPDDFTGCVIAWNSNNLDSKVGGNYNYLYRLFRKSNLKPFERDISTEIYQAGSTPCNG
VEGFNCYFPLQSYGFQPTNGVGYQPYRVVVLSFELLHAPATVCGPKKSTPLVKNKCVNFNFNGLTGTGVLTESNKKFLP
FQQFGRDIADTTDAVRDPQTLEILDITPCSFGGVSVITPGTNTSNQVAVLYQNVNCTEVPVAIHADQLTPTWRVYSTGS
NVFQTRAGCLIGAEHVNNSYECDIPIGAGICASYQTQTNSPSRAGSVASQSIIAYTMSLGAENSVAYSNNSIAIPTNFTISV
TTEILPVSMTKTSVDCTMYICGDSTECSNLLLQYGSFCTQLNRALTGIAVEQDKNTQEVFAQVKQIYKTPPIKDFGGFNFS
QILPDPSKPSKRSFIEDLLFNKVTLADAGFIKQYGDCLGDIAARDLICAQKFNGLTVLPPLLTDEMIAQYTSALLAGTITSG
WTFGAGAALQIPFAMQMAYRFNGIGVTQNVLYENQKLIANQFNSAIGKIQDSLSSTASALGKLQDVVNQNAQALNTL
VKQLSSNFGAISSVLNDILSRLDKVEAEVQIDRLITGRLQSLQTYVTQQLIRAAEIRASANLAATKMSECVLGQSKRVDFC
GKGYHLMSFPQSAPHGVVFLHVTYVPAQEKNFTTAPAICHDGKAHFPREGVFVSNGTHWFVTQRNFYEPQIITTDNTF
VSGNCDVVIGIVNNTVYDPLQPELDSFKEELDKYFKNHTSPDVDLGDISGINASVVNIQKEIDRLNEVAKNLNESLIDLQE
LGKYEQGSGYIPEAPRDGQAYVRKDGEWVLLSTFLGRSLEVLFQGPGSLPETGGGSDYKDDDDKGGGGSGGGGSGGG
GSGGGGSGGGGSHHHHHH
SEQ ID NO 32: SEQ ID NO 2 + D614N + G880C + F888C
MFVFLVLLPLVSSQCVNLTTRTQLPPAYTNSFTRGVYYPDKVFRSSVLHSTQDLFLPFFSNVTWFHAIHVSGTNGTKRFD
NPVLPFNDGVYFASTEKSNIIRGWIFGTTLDSKTQSLLIVNNATNVVIKVCEFQFCNDPFLGVYYHKNNKSWMESEFRVY
SSANNCTFEYVSQPFLMDLEGKQGNFKNLREFVFKNIDGYFKIYSKHTPINLVRDLPQGFSALEPLVDLPIGINITRFQTLL
ALHRSYLTPGDSSSGWTAGAAAYYVGYLQPRTFLLKYNENGTITDAVDCALDPLSETKCTLKSFTVEKGIYQTSNFRVQP
TESIVRFPNITNLCPFGEVFNATRFASVYAWNRKRISNCVADYSVLYNSASFSTFKCYGVSPTKLNDLCFTNVYADSFVIR
GDEVRQIAPGQTGKIADYNYKLPDDFTGCVIAWNSNNLDSKVGGNYNYLYRLFRKSNLKPFERDISTEIYQAGSTPCNG
VEGFNCYFPLQSYGFQPTNGVGYQPYRVVVLSFELLHAPATVCGPKKSTNLVKNKCVNFNFNGLTGTGVLTESNKKFLP
FQQFGRDIADTTDAVRDPQTLEILDITPCSFGGVSVITPGTNTSNQVAVLYQNVNCTEVPVAIHADQLTPTWRVYSTGS
NVFQTRAGCLIGAEHVNNSYECDIPIGAGICASYQTQTNSPSRAGSVASQSIIAYTMSLGAENSVAYSNNSIAIPTNFTISV
TTEILPVSMTKTSVDCTMYICGDSTECSNLLLQYGSFCTQLNRALTGIAVEQDKNTQEVFAQVKQIYKTPPIKDFGGFNFS
QILPDPSKPSKRSFIEDLLFNKVTLADAGFIKQYGDCLGDIAARDLICAQKFNGLTVLPPLLTDEMIAQYTSALLACTITSG
WTCGAGAALQIPFAMQMAYRFNGIGVTQNVLYENQKLIANQFNSAIGKIQDSLSSTASALGKLQDVVNQNAQALNTL
VKQLSSNFGAISSVLNDILSRLDKVEAEVQIDRLITGRLQSLQTYVTQQLIRAAEIRASANLAATKMSECVLGQSKRVDFC
GKGYHLMSFPQSAPHGVVFLHVTYVPAQEKNFTTAPAICHDGKAHFPREGVFVSNGTHWFVTQRNFYEPQIITTDNTF
VSGNCDVVIGIVNNTVYDPLQPELDSFKEELDKYFKNHTSPDVDLGDISGINASVVNIQKEIDRLNEVAKNLNESLIDLQE
LGKYEQGSGYIPEAPRDGQAYVRKDGEWVLLSTFLGRSLEVLFQGPGSLPETGGGSDYKDDDDKGGGGSGGGGSGGG
GSGGGGSGGGGSHHHHHH
SEQ ID NO 33: SEQ ID NO 2 + D614N + S884C + A893C
MFVFLVLLPLVSSQCVNLTTRTQLPPAYTNSFTRGVYYPDKVFRSSVLHSTQDLFLPFFSNVTWFHAIHVSGTNGTKRFD
NPVLPFNDGVYFASTEKSNIIRGWIFGTTLDSKTQSLLIVNNATNVVIKVCEFQFCNDPFLGVYYHKNNKSWMESEFRVY
SSANNCTFEYVSQPFLMDLEGKQGNFKNLREFVFKNIDGYFKIYSKHTPINLVRDLPQGFSALEPLVDLPIGINITRFQTLL
ALHRSYLTPGDSSSGWTAGAAAYYVGYLQPRTFLLKYNENGTITDAVDCALDPLSETKCTLKSFTVEKGIYQTSNFRVQP
TESIVRFPNITNLCPFGEVFNATRFASVYAWNRKRISNCVADYSVLYNSASFSTFKCYGVSPTKLNDLCFTNVYADSFVIR
GDEVRQIAPGQTGKIADYNYKLPDDFTGCVIAWNSNNLDSKVGGNYNYLYRLFRKSNLKPFERDISTEIYQAGSTPCNG
VEGFNCYFPLQSYGFQPTNGVGYQPYRVVVLSFELLHAPATVCGPKKSTNLVKNKCVNFNFNGLTGTGVLTESNKKFLP
FQQFGRDIADTTDAVRDPQTLEILDITPCSFGGVSVITPGTNTSNQVAVLYQNVNCTEVPVAIHADQLTPTWRVYSTGS
NVFQTRAGCLIGAEHVNNSYECDIPIGAGICASYQTQTNSPSRAGSVASQSIIAYTMSLGAENSVAYSNNSIAIPTNFTISV
TTEILPVSMTKTSVDCTMYICGDSTECSNLLLQYGSFCTQLNRALTGIAVEQDKNTQEVFAQVKQIYKTPPIKDFGGFNFS
QILPDPSKPSKRSFIEDLLFNKVTLADAGFIKQYGDCLGDIAARDLICAQKFNGLTVLPPLLTDEMIAQYTSALLAGTITCG
WTFGAGACLQIPFAMQMAYRFNGIGVTQNVLYENQKLIANQFNSAIGKIQDSLSSTASALGKLQDVVNQNAQALNTL
VKQLSSNFGAISSVLNDILSRLDKVEAEVQIDRLITGRLQSLQTYVTQQLIRAAEIRASANLAATKMSECVLGQSKRVDFC
GKGYHLMSFPQSAPHGVVFLHVTYVPAQEKNFTTAPAICHDGKAHFPREGVFVSNGTHWFVTQRNFYEPQIITTDNTF
VSGNCDVVIGIVNNTVYDPLQPELDSFKEELDKYFKNHTSPDVDLGDISGINASVVNIQKEIDRLNEVAKNLNESLIDLQE
LGKYEQGSGYIPEAPRDGQAYVRKDGEWVLLSTFLGRSLEVLFQGPGSLPETGGGSDYKDDDDKGGGGSGGGGSGGG
GSGGGGSGGGGSHHHHHH
SEQ ID NO 34: SEQ ID NO 2 + T572I + N532P
MFVFLVLLPLVSSQCVNLTTRTQLPPAYTNSFTRGVYYPDKVFRSSVLHSTQDLFLPFFSNVTWFHAIHVSGTNGTKRFD
NPVLPFNDGVYFASTEKSNIIRGWIFGTTLDSKTQSLLIVNNATNVVIKVCEFQFCNDPFLGVYYHKNNKSWMESEFRVY
SSANNCTFEYVSQPFLMDLEGKQGNFKNLREFVFKNIDGYFKIYSKHTPINLVRDLPQGFSALEPLVDLPIGINITRFQTLL
ALHRSYLTPGDSSSGWTAGAAAYYVGYLQPRTFLLKYNENGTITDAVDCALDPLSETKCTLKSFTVEKGIYQTSNFRVQP
TESIVRFPNITNLCPFGEVFNATRFASVYAWNRKRISNCVADYSVLYNSASFSTFKCYGVSPTKLNDLCFTNVYADSFVIR
GDEVRQIAPGQTGKIADYNYKLPDDFTGCVIAWNSNNLDSKVGGNYNYLYRLFRKSNLKPFERDISTEIYQAGSTPCNG
VEGFNCYFPLQSYGFQPTNGVGYQPYRVVVLSFELLHAPATVCGPKKSTPLVKNKCVNFNFNGLTGTGVLTESNKKFLP
FQQFGRDIADITDAVRDPQTLEILDITPCSFGGVSVITPGTNTSNQVAVLYQDVNCTEVPVAIHADQLTPTWRVYSTGS
NVFQTRAGCLIGAEHVNNSYECDIPIGAGICASYQTQTNSPSRAGSVASQSIIAYTMSLGAENSVAYSNNSIAIPTNFTISV
TTEILPVSMTKTSVDCTMYICGDSTECSNLLLQYGSFCTQLNRALTGIAVEQDKNTQEVFAQVKQIYKTPPIKDFGGFNFS
QILPDPSKPSKRSFIEDLLFNKVTLADAGFIKQYGDCLGDIAARDLICAQKFNGLTVLPPLLTDEMIAQYTSALLAGTITSG
WTFGAGAALQIPFAMQMAYRFNGIGVTQNVLYENQKLIANQFNSAIGKIQDSLSSTASALGKLQDVVNQNAQALNTL
VKQLSSNFGAISSVLNDILSRLDKVEAEVQIDRLITGRLQSLQTYVTQQLIRAAEIRASANLAATKMSECVLGQSKRVDFC
GKGYHLMSFPQSAPHGVVFLHVTYVPAQEKNFTTAPAICHDGKAHFPREGVFVSNGTHWFVTQRNFYEPQIITTDNTF
VSGNCDVVIGIVNNTVYDPLQPELDSFKEELDKYFKNHTSPDVDLGDISGINASVVNIQKEIDRLNEVAKNLNESLIDLQE
LGKYEQGSGYIPEAPRDGQAYVRKDGEWVLLSTFLGRSLEVLFQGPGSLPETGGGSDYKDDDDKGGGGSGGGGSGGG
GSGGGGSGGGGSHHHHHH
SEQ ID NO 35: SEQ ID NO 2 + T572I + G880C + F888C
MFVFLVLLPLVSSQCVNLTTRTQLPPAYTNSFTRGVYYPDKVFRSSVLHSTQDLFLPFFSNVTWFHAIHVSGTNGTKRFD
NPVLPFNDGVYFASTEKSNIIRGWIFGTTLDSKTQSLLIVNNATNVVIKVCEFQFCNDPFLGVYYHKNNKSWMESEFRVY
SSANNCTFEYVSQPFLMDLEGKQGNFKNLREFVFKNIDGYFKIYSKHTPINLVRDLPQGFSALEPLVDLPIGINITRFQTLL
ALHRSYLTPGDSSSGWTAGAAAYYVGYLQPRTFLLKYNENGTITDAVDCALDPLSETKCTLKSFTVEKGIYQTSNFRVQP
TESIVRFPNITNLCPFGEVFNATRFASVYAWNRKRISNCVADYSVLYNSASFSTFKCYGVSPTKLNDLCFTNVYADSFVIR
GDEVRQIAPGQTGKIADYNYKLPDDFTGCVIAWNSNNLDSKVGGNYNYLYRLFRKSNLKPFERDISTEIYQAGSTPCNG
VEGFNCYFPLQSYGFQPTNGVGYQPYRVVVLSFELLHAPATVCGPKKSTNLVKNKCVNFNFNGLTGTGVLTESNKKFLP
FQQFGRDIADITDAVRDPQTLEILDITPCSFGGVSVITPGTNTSNQVAVLYQDVNCTEVPVAIHADQLTPTWRVYSTGS
NVFQTRAGCLIGAEHVNNSYECDIPIGAGICASYQTQTNSPSRAGSVASQSIIAYTMSLGAENSVAYSNNSIAIPTNFTISV
TTEILPVSMTKTSVDCTMYICGDSTECSNLLLQYGSFCTQLNRALTGIAVEQDKNTQEVFAQVKQIYKTPPIKDFGGFNFS
QILPDPSKPSKRSFIEDLLFNKVTLADAGFIKQYGDCLGDIAARDLICAQKFNGLTVLPPLLTDEMIAQYTSALLACTITSG
WTCGAGAALQIPFAMQMAYRFNGIGVTQNVLYENQKLIANQFNSAIGKIQDSLSSTASALGKLQDVVNQNAQALNTL
VKQLSSNFGAISSVLNDILSRLDKVEAEVQIDRLITGRLQSLQTYVTQQLIRAAEIRASANLAATKMSECVLGQSKRVDFC
GKGYHLMSFPQSAPHGVVFLHVTYVPAQEKNFTTAPAICHDGKAHFPREGVFVSNGTHWFVTQRNFYEPQIITTDNTF
VSGNCDVVIGIVNNTVYDPLQPELDSFKEELDKYFKNHTSPDVDLGDISGINASVVNIQKEIDRLNEVAKNLNESLIDLQE
LGKYEQGSGYIPEAPRDGQAYVRKDGEWVLLSTFLGRSLEVLFQGPGSLPETGGGSDYKDDDDKGGGGSGGGGSGGG
GSGGGGSGGGGSHHHHHH
SEQ ID NO 36: SEQ ID NO 2 + T572I + S884C + A893C
MFVFLVLLPLVSSQCVNLTTRTQLPPAYTNSFTRGVYYPDKVFRSSVLHSTQDLFLPFFSNVTWFHAIHVSGTNGTKRFD
NPVLPFNDGVYFASTEKSNIIRGWIFGTTLDSKTQSLLIVNNATNVVIKVCEFQFCNDPFLGVYYHKNNKSWMESEFRVY
SSANNCTFEYVSQPFLMDLEGKQGNFKNLREFVFKNIDGYFKIYSKHTPINLVRDLPQGFSALEPLVDLPIGINITRFQTLL
ALHRSYLTPGDSSSGWTAGAAAYYVGYLQPRTFLLKYNENGTITDAVDCALDPLSETKCTLKSFTVEKGIYQTSNFRVQP
TESIVRFPNITNLCPFGEVFNATRFASVYAWNRKRISNCVADYSVLYNSASFSTFKCYGVSPTKLNDLCFTNVYADSFVIR
GDEVRQIAPGQTGKIADYNYKLPDDFTGCVIAWNSNNLDSKVGGNYNYLYRLFRKSNLKPFERDISTEIYQAGSTPCNG
VEGFNCYFPLQSYGFQPTNGVGYQPYRVVVLSFELLHAPATVCGPKKSTNLVKNKCVNFNFNGLTGTGVLTESNKKFLP
FQQFGRDIADITDAVRDPQTLEILDITPCSFGGVSVITPGTNTSNQVAVLYQDVNCTEVPVAIHADQLTPTWRVYSTGS
NVFQTRAGCLIGAEHVNNSYECDIPIGAGICASYQTQTNSPSRAGSVASQSIIAYTMSLGAENSVAYSNNSIAIPTNFTISV
TTEILPVSMTKTSVDCTMYICGDSTECSNLLLQYGSFCTQLNRALTGIAVEQDKNTQEVFAQVKQIYKTPPIKDFGGFNFS
QILPDPSKPSKRSFIEDLLFNKVTLADAGFIKQYGDCLGDIAARDLICAQKFNGLTVLPPLLTDEMIAQYTSALLAGTITCG
WTFGAGACLQIPFAMQMAYRFNGIGVTQNVLYENQKLIANQFNSAIGKIQDSLSSTASALGKLQDVVNQNAQALNTL
VKQLSSNFGAISSVLNDILSRLDKVEAEVQIDRLITGRLQSLQTYVTQQLIRAAEIRASANLAATKMSECVLGQSKRVDFC
GKGYHLMSFPQSAPHGVVFLHVTYVPAQEKNFTTAPAICHDGKAHFPREGVFVSNGTHWFVTQRNFYEPQIITTDNTF
VSGNCDVVIGIVNNTVYDPLQPELDSFKEELDKYFKNHTSPDVDLGDISGINASVVNIQKEIDRLNEVAKNLNESLIDLQE
LGKYEQGSGYIPEAPRDGQAYVRKDGEWVLLSTFLGRSLEVLFQGPGSLPETGGGSDYKDDDDKGGGGSGGGGSGGG
GSGGGGSGGGGSHHHHHH
SEQ ID NO 37: SEQ ID NO 2 + N532P + G880C + F888C
MFVFLVLLPLVSSQCVNLTTRTQLPPAYTNSFTRGVYYPDKVFRSSVLHSTQDLFLPFFSNVTWFHAIHVSGTNGTKRFD
NPVLPFNDGVYFASTEKSNIIRGWIFGTTLDSKTQSLLIVNNATNVVIKVCEFQFCNDPFLGVYYHKNNKSWMESEFRVY
SSANNCTFEYVSQPFLMDLEGKQGNFKNLREFVFKNIDGYFKIYSKHTPINLVRDLPQGFSALEPLVDLPIGINITRFQTLL
ALHRSYLTPGDSSSGWTAGAAAYYVGYLQPRTFLLKYNENGTITDAVDCALDPLSETKCTLKSFTVEKGIYQTSNFRVQP
TESIVRFPNITNLCPFGEVFNATRFASVYAWNRKRISNCVADYSVLYNSASFSTFKCYGVSPTKLNDLCFTNVYADSFVIR
GDEVRQIAPGQTGKIADYNYKLPDDFTGCVIAWNSNNLDSKVGGNYNYLYRLFRKSNLKPFERDISTEIYQAGSTPCNG
VEGFNCYFPLQSYGFQPTNGVGYQPYRVVVLSFELLHAPATVCGPKKSTPLVKNKCVNFNFNGLTGTGVLTESNKKFLP
FQQFGRDIADTTDAVRDPQTLEILDITPCSFGGVSVITPGTNTSNQVAVLYQDVNCTEVPVAIHADQLTPTWRVYSTGS
NVFQTRAGCLIGAEHVNNSYECDIPIGAGICASYQTQTNSPSRAGSVASQSIIAYTMSLGAENSVAYSNNSIAIPTNFTISV
TTEILPVSMTKTSVDCTMYICGDSTECSNLLLQYGSFCTQLNRALTGIAVEQDKNTQEVFAQVKQIYKTPPIKDFGGFNFS
QILPDPSKPSKRSFIEDLLFNKVTLADAGFIKQYGDCLGDIAARDLICAQKFNGLTVLPPLLTDEMIAQYTSALLACTITSG
WTCGAGAALQIPFAMQMAYRFNGIGVTQNVLYENQKLIANQFNSAIGKIQDSLSSTASALGKLQDVVNQNAQALNTL
VKQLSSNFGAISSVLNDILSRLDKVEAEVQIDRLITGRLQSLQTYVTQQLIRAAEIRASANLAATKMSECVLGQSKRVDFC
GKGYHLMSFPQSAPHGVVFLHVTYVPAQEKNFTTAPAICHDGKAHFPREGVFVSNGTHWFVTQRNFYEPQIITTDNTF
VSGNCDVVIGIVNNTVYDPLQPELDSFKEELDKYFKNHTSPDVDLGDISGINASVVNIQKEIDRLNEVAKNLNESLIDLQE
LGKYEQGSGYIPEAPRDGQAYVRKDGEWVLLSTFLGRSLEVLFQGPGSLPETGGGSDYKDDDDKGGGGSGGGGSGGG
GSGGGGSGGGGSHHHHHH
SEQ ID NO 38: SEQ ID NO 2 + N532P + S884C + A893C
MFVFLVLLPLVSSQCVNLTTRTQLPPAYTNSFTRGVYYPDKVFRSSVLHSTQDLFLPFFSNVTWFHAIHVSGTNGTKRFD
NPVLPFNDGVYFASTEKSNIIRGWIFGTTLDSKTQSLLIVNNATNVVIKVCEFQFCNDPFLGVYYHKNNKSWMESEFRVY
SSANNCTFEYVSQPFLMDLEGKQGNFKNLREFVFKNIDGYFKIYSKHTPINLVRDLPQGFSALEPLVDLPIGINITRFQTLL
ALHRSYLTPGDSSSGWTAGAAAYYVGYLQPRTFLLKYNENGTITDAVDCALDPLSETKCTLKSFTVEKGIYQTSNFRVQP
TESIVRFPNITNLCPFGEVFNATRFASVYAWNRKRISNCVADYSVLYNSASFSTFKCYGVSPTKLNDLCFTNVYADSFVIR
GDEVRQIAPGQTGKIADYNYKLPDDFTGCVIAWNSNNLDSKVGGNYNYLYRLFRKSNLKPFERDISTEIYQAGSTPCNG
VEGFNCYFPLQSYGFQPTNGVGYQPYRVVVLSFELLHAPATVCGPKKSTPLVKNKCVNFNFNGLTGTGVLTESNKKFLP
FQQFGRDIADTTDAVRDPQTLEILDITPCSFGGVSVITPGTNTSNQVAVLYQDVNCTEVPVAIHADQLTPTWRVYSTGS
NVFQTRAGCLIGAEHVNNSYECDIPIGAGICASYQTQTNSPSRAGSVASQSIIAYTMSLGAENSVAYSNNSIAIPTNFTISV
TTEILPVSMTKTSVDCTMYICGDSTECSNLLLQYGSFCTQLNRALTGIAVEQDKNTQEVFAQVKQIYKTPPIKDFGGFNFS
QILPDPSKPSKRSFIEDLLFNKVTLADAGFIKQYGDCLGDIAARDLICAQKFNGLTVLPPLLTDEMIAQYTSALLAGTITCG
WTFGAGACLQIPFAMQMAYRFNGIGVTQNVLYENQKLIANQFNSAIGKIQDSLSSTASALGKLQDVVNQNAQALNTL
VKQLSSNFGAISSVLNDILSRLDKVEAEVQIDRLITGRLQSLQTYVTQQLIRAAEIRASANLAATKMSECVLGQSKRVDFC
GKGYHLMSFPQSAPHGVVFLHVTYVPAQEKNFTTAPAICHDGKAHFPREGVFVSNGTHWFVTQRNFYEPQIITTDNTF
VSGNCDVVIGIVNNTVYDPLQPELDSFKEELDKYFKNHTSPDVDLGDISGINASVVNIQKEIDRLNEVAKNLNESLIDLQE
LGKYEQGSGYIPEAPRDGQAYVRKDGEWVLLSTFLGRSLEVLFQGPGSLPETGGGSDYKDDDDKGGGGSGGGGSGGG
GSGGGGSGGGGSHHHHHH
SEQ ID NO 39: SEQ ID NO 2 + A942P + A892P + D614N
MFVFLVLLPLVSSQCVNLTTRTQLPPAYTNSFTRGVYYPDKVFRSSVLHSTQDLFLPFFSNVTWFHAIHVSGTNGTKRFD
NPVLPFNDGVYFASTEKSNIIRGWIFGTTLDSKTQSLLIVNNATNVVIKVCEFQFCNDPFLGVYYHKNNKSWMESEFRVY
SSANNCTFEYVSQPFLMDLEGKQGNFKNLREFVFKNIDGYFKIYSKHTPINLVRDLPQGFSALEPLVDLPIGINITRFQTLL
ALHRSYLTPGDSSSGWTAGAAAYYVGYLQPRTFLLKYNENGTITDAVDCALDPLSETKCTLKSFTVEKGIYQTSNFRVQP
TESIVRFPNITNLCPFGEVFNATRFASVYAWNRKRISNCVADYSVLYNSASFSTFKCYGVSPTKLNDLCFTNVYADSFVIR
GDEVRQIAPGQTGKIADYNYKLPDDFTGCVIAWNSNNLDSKVGGNYNYLYRLFRKSNLKPFERDISTEIYQAGSTPCNG
VEGFNCYFPLQSYGFQPTNGVGYQPYRVVVLSFELLHAPATVCGPKKSTNLVKNKCVNFNFNGLTGTGVLTESNKKFLP
FQQFGRDIADTTDAVRDPQTLEILDITPCSFGGVSVITPGTNTSNQVAVLYQNVNCTEVPVAIHADQLTPTWRVYSTGS
NVFQTRAGCLIGAEHVNNSYECDIPIGAGICASYQTQTNSPSRAGSVASQSIIAYTMSLGAENSVAYSNNSIAIPTNFTISV
TTEILPVSMTKTSVDCTMYICGDSTECSNLLLQYGSFCTQLNRALTGIAVEQDKNTQEVFAQVKQIYKTPPIKDFGGFNFS
QILPDPSKPSKRSFIEDLLFNKVTLADAGFIKQYGDCLGDIAARDLICAQKFNGLTVLPPLLTDEMIAQYTSALLAGTITSG
WTFGAGPALQIPFAMQMAYRFNGIGVTQNVLYENQKLIANQFNSAIGKIQDSLSSTPSALGKLQDVVNQNAQALNTL
VKQLSSNFGAISSVLNDILSRLDKVEAEVQIDRLITGRLQSLQTYVTQQLIRAAEIRASANLAATKMSECVLGQSKRVDFC
GKGYHLMSFPQSAPHGVVFLHVTYVPAQEKNFTTAPAICHDGKAHFPREGVFVSNGTHWFVTQRNFYEPQIITTDNTF
VSGNCDVVIGIVNNTVYDPLQPELDSFKEELDKYFKNHTSPDVDLGDISGINASVVNIQKEIDRLNEVAKNLNESLIDLQE
LGKYEQGSGYIPEAPRDGQAYVRKDGEWVLLSTFLGRSLEVLFQGPGSLPETGGGSDYKDDDDKGGGGSGGGGSGGG
GSGGGGSGGGGSHHHHHH
SEQ ID NO 40: SEQ ID NO 2 + A942P + A892P + T572I
MFVFLVLLPLVSSQCVNLTTRTQLPPAYTNSFTRGVYYPDKVFRSSVLHSTQDLFLPFFSNVTWFHAIHVSGTNGTKRFD
NPVLPFNDGVYFASTEKSNIIRGWIFGTTLDSKTQSLLIVNNATNVVIKVCEFQFCNDPFLGVYYHKNNKSWMESEFRVY
SSANNCTFEYVSQPFLMDLEGKQGNFKNLREFVFKNIDGYFKIYSKHTPINLVRDLPQGFSALEPLVDLPIGINITRFQTLL
ALHRSYLTPGDSSSGWTAGAAAYYVGYLQPRTFLLKYNENGTITDAVDCALDPLSETKCTLKSFTVEKGIYQTSNFRVQP
TESIVRFPNITNLCPFGEVFNATRFASVYAWNRKRISNCVADYSVLYNSASFSTFKCYGVSPTKLNDLCFTNVYADSFVIR
GDEVRQIAPGQTGKIADYNYKLPDDFTGCVIAWNSNNLDSKVGGNYNYLYRLFRKSNLKPFERDISTEIYQAGSTPCNG
VEGFNCYFPLQSYGFQPTNGVGYQPYRVVVLSFELLHAPATVCGPKKSTNLVKNKCVNFNFNGLTGTGVLTESNKKFLP
FQQFGRDIADITDAVRDPQTLEILDITPCSFGGVSVITPGTNTSNQVAVLYQDVNCTEVPVAIHADQLTPTWRVYSTGS
NVFQTRAGCLIGAEHVNNSYECDIPIGAGICASYQTQTNSPSRAGSVASQSIIAYTMSLGAENSVAYSNNSIAIPTNFTISV
TTEILPVSMTKTSVDCTMYICGDSTECSNLLLQYGSFCTQLNRALTGIAVEQDKNTQEVFAQVKQIYKTPPIKDFGGFNFS
QILPDPSKPSKRSFIEDLLFNKVTLADAGFIKQYGDCLGDIAARDLICAQKFNGLTVLPPLLTDEMIAQYTSALLAGTITSG
WTFGAGPALQIPFAMQMAYRFNGIGVTQNVLYENQKLIANQFNSAIGKIQDSLSSTPSALGKLQDVVNQNAQALNTL
VKQLSSNFGAISSVLNDILSRLDKVEAEVQIDRLITGRLQSLQTYVTQQLIRAAEIRASANLAATKMSECVLGQSKRVDFC
GKGYHLMSFPQSAPHGVVFLHVTYVPAQEKNFTTAPAICHDGKAHFPREGVFVSNGTHWFVTQRNFYEPQIITTDNTF
VSGNCDVVIGIVNNTVYDPLQPELDSFKEELDKYFKNHTSPDVDLGDISGINASVVNIQKEIDRLNEVAKNLNESLIDLQE
LGKYEQGSGYIPEAPRDGQAYVRKDGEWVLLSTFLGRSLEVLFQGPGSLPETGGGSDYKDDDDKGGGGSGGGGSGGG
GSGGGGSGGGGSHHHHHH
SEQ ID NO 41: SEQ ID NO 2 + A942P + A892P + N532P
MFVFLVLLPLVSSQCVNLTTRTQLPPAYTNSFTRGVYYPDKVFRSSVLHSTQDLFLPFFSNVTWFHAIHVSGTNGTKRFD
NPVLPFNDGVYFASTEKSNIIRGWIFGTTLDSKTQSLLIVNNATNVVIKVCEFQFCNDPFLGVYYHKNNKSWMESEFRVY
SSANNCTFEYVSQPFLMDLEGKQGNFKNLREFVFKNIDGYFKIYSKHTPINLVRDLPQGFSALEPLVDLPIGINITRFQTLL
ALHRSYLTPGDSSSGWTAGAAAYYVGYLQPRTFLLKYNENGTITDAVDCALDPLSETKCTLKSFTVEKGIYQTSNFRVQP
TESIVRFPNITNLCPFGEVFNATRFASVYAWNRKRISNCVADYSVLYNSASFSTFKCYGVSPTKLNDLCFTNVYADSFVIR
GDEVRQIAPGQTGKIADYNYKLPDDFTGCVIAWNSNNLDSKVGGNYNYLYRLFRKSNLKPFERDISTEIYQAGSTPCNG
VEGFNCYFPLQSYGFQPTNGVGYQPYRVVVLSFELLHAPATVCGPKKSTPLVKNKCVNFNFNGLTGTGVLTESNKKFLP
FQQFGRDIADTTDAVRDPQTLEILDITPCSFGGVSVITPGTNTSNQVAVLYQDVNCTEVPVAIHADQLTPTWRVYSTGS
NVFQTRAGCLIGAEHVNNSYECDIPIGAGICASYQTQTNSPSRAGSVASQSIIAYTMSLGAENSVAYSNNSIAIPTNFTISV
TTEILPVSMTKTSVDCTMYICGDSTECSNLLLQYGSFCTQLNRALTGIAVEQDKNTQEVFAQVKQIYKTPPIKDFGGFNFS
QILPDPSKPSKRSFIEDLLFNKVTLADAGFIKQYGDCLGDIAARDLICAQKFNGLTVLPPLLTDEMIAQYTSALLAGTITSG
WTFGAGPALQIPFAMQMAYRFNGIGVTQNVLYENQKLIANQFNSAIGKIQDSLSSTPSALGKLQDVVNQNAQALNTL
VKQLSSNFGAISSVLNDILSRLDKVEAEVQIDRLITGRLQSLQTYVTQQLIRAAEIRASANLAATKMSECVLGQSKRVDFC
GKGYHLMSFPQSAPHGVVFLHVTYVPAQEKNFTTAPAICHDGKAHFPREGVFVSNGTHWFVTQRNFYEPQIITTDNTF
VSGNCDVVIGIVNNTVYDPLQPELDSFKEELDKYFKNHTSPDVDLGDISGINASVVNIQKEIDRLNEVAKNLNESLIDLQE
LGKYEQGSGYIPEAPRDGQAYVRKDGEWVLLSTFLGRSLEVLFQGPGSLPETGGGSDYKDDDDKGGGGSGGGGSGGG
GSGGGGSGGGGSHHHHHH
SEQ ID NO 42: SEQ ID NO 2 + A942P + A892P + G880C + F888C
MFVFLVLLPLVSSQCVNLTTRTQLPPAYTNSFTRGVYYPDKVFRSSVLHSTQDLFLPFFSNVTWFHAIHVSGTNGTKRFD
NPVLPFNDGVYFASTEKSNIIRGWIFGTTLDSKTQSLLIVNNATNVVIKVCEFQFCNDPFLGVYYHKNNKSWMESEFRVY
SSANNCTFEYVSQPFLMDLEGKQGNFKNLREFVFKNIDGYFKIYSKHTPINLVRDLPQGFSALEPLVDLPIGINITRFQTLL
ALHRSYLTPGDSSSGWTAGAAAYYVGYLQPRTFLLKYNENGTITDAVDCALDPLSETKCTLKSFTVEKGIYQTSNFRVQP
TESIVRFPNITNLCPFGEVFNATRFASVYAWNRKRISNCVADYSVLYNSASFSTFKCYGVSPTKLNDLCFTNVYADSFVIR
GDEVRQIAPGQTGKIADYNYKLPDDFTGCVIAWNSNNLDSKVGGNYNYLYRLFRKSNLKPFERDISTEIYQAGSTPCNG
VEGFNCYFPLQSYGFQPTNGVGYQPYRVVVLSFELLHAPATVCGPKKSTNLVKNKCVNFNFNGLTGTGVLTESNKKFLP
FQQFGRDIADTTDAVRDPQTLEILDITPCSFGGVSVITPGTNTSNQVAVLYQDVNCTEVPVAIHADQLTPTWRVYSTGS
NVFQTRAGCLIGAEHVNNSYECDIPIGAGICASYQTQTNSPSRAGSVASQSIIAYTMSLGAENSVAYSNNSIAIPTNFTISV
TTEILPVSMTKTSVDCTMYICGDSTECSNLLLQYGSFCTQLNRALTGIAVEQDKNTQEVFAQVKQIYKTPPIKDFGGFNFS
QILPDPSKPSKRSFIEDLLFNKVTLADAGFIKQYGDCLGDIAARDLICAQKFNGLTVLPPLLTDEMIAQYTSALLACTITSG
WTCGAGPALQIPFAMQMAYRFNGIGVTQNVLYENQKLIANQFNSAIGKIQDSLSSTPSALGKLQDVVNQNAQALNTL
VKQLSSNFGAISSVLNDILSRLDKVEAEVQIDRLITGRLQSLQTYVTQQLIRAAEIRASANLAATKMSECVLGQSKRVDFC
GKGYHLMSFPQSAPHGVVFLHVTYVPAQEKNFTTAPAICHDGKAHFPREGVFVSNGTHWFVTQRNFYEPQIITTDNTF
VSGNCDVVIGIVNNTVYDPLQPELDSFKEELDKYFKNHTSPDVDLGDISGINASVVNIQKEIDRLNEVAKNLNESLIDLQE
LGKYEQGSGYIPEAPRDGQAYVRKDGEWVLLSTFLGRSLEVLFQGPGSLPETGGGSDYKDDDDKGGGGSGGGGSGGG
GSGGGGSGGGGSHHHHHH
SEQ ID NO 43: SEQ ID NO 2 + A942P + A892P + S884C + A893C
MFVFLVLLPLVSSQCVNLTTRTQLPPAYTNSFTRGVYYPDKVFRSSVLHSTQDLFLPFFSNVTWFHAIHVSGTNGTKRFD
NPVLPFNDGVYFASTEKSNIIRGWIFGTTLDSKTQSLLIVNNATNVVIKVCEFQFCNDPFLGVYYHKNNKSWMESEFRVY
SSANNCTFEYVSQPFLMDLEGKQGNFKNLREFVFKNIDGYFKIYSKHTPINLVRDLPQGFSALEPLVDLPIGINITRFQTLL
ALHRSYLTPGDSSSGWTAGAAAYYVGYLQPRTFLLKYNENGTITDAVDCALDPLSETKCTLKSFTVEKGIYQTSNFRVQP
TESIVRFPNITNLCPFGEVFNATRFASVYAWNRKRISNCVADYSVLYNSASFSTFKCYGVSPTKLNDLCFTNVYADSFVIR
GDEVRQIAPGQTGKIADYNYKLPDDFTGCVIAWNSNNLDSKVGGNYNYLYRLFRKSNLKPFERDISTEIYQAGSTPCNG
VEGFNCYFPLQSYGFQPTNGVGYQPYRVVVLSFELLHAPATVCGPKKSTNLVKNKCVNFNFNGLTGTGVLTESNKKFLP
FQQFGRDIADTTDAVRDPQTLEILDITPCSFGGVSVITPGTNTSNQVAVLYQDVNCTEVPVAIHADQLTPTWRVYSTGS
NVFQTRAGCLIGAEHVNNSYECDIPIGAGICASYQTQTNSPSRAGSVASQSIIAYTMSLGAENSVAYSNNSIAIPTNFTISV
TTEILPVSMTKTSVDCTMYICGDSTECSNLLLQYGSFCTQLNRALTGIAVEQDKNTQEVFAQVKQIYKTPPIKDFGGFNFS
QILPDPSKPSKRSFIEDLLFNKVTLADAGFIKQYGDCLGDIAARDLICAQKFNGLTVLPPLLTDEMIAQYTSALLAGTITCG
WTFGAGPCLQIPFAMQMAYRFNGIGVTQNVLYENQKLIANQFNSAIGKIQDSLSSTPSALGKLQDVVNQNAQALNTL
VKQLSSNFGAISSVLNDILSRLDKVEAEVQIDRLITGRLQSLQTYVTQQLIRAAEIRASANLAATKMSECVLGQSKRVDFC
GKGYHLMSFPQSAPHGVVFLHVTYVPAQEKNFTTAPAICHDGKAHFPREGVFVSNGTHWFVTQRNFYEPQIITTDNTF
VSGNCDVVIGIVNNTVYDPLQPELDSFKEELDKYFKNHTSPDVDLGDISGINASVVNIQKEIDRLNEVAKNLNESLIDLQE
LGKYEQGSGYIPEAPRDGQAYVRKDGEWVLLSTFLGRSLEVLFQGPGSLPETGGGSDYKDDDDKGGGGSGGGGSGGG
GSGGGGSGGGGSHHHHHH
SEQ ID NO 44: SEQ ID NO 2 + A942P + D614N + T572I
MFVFLVLLPLVSSQCVNLTTRTQLPPAYTNSFTRGVYYPDKVFRSSVLHSTQDLFLPFFSNVTWFHAIHVSGTNGTKRFD
NPVLPFNDGVYFASTEKSNIIRGWIFGTTLDSKTQSLLIVNNATNVVIKVCEFQFCNDPFLGVYYHKNNKSWMESEFRVY
SSANNCTFEYVSQPFLMDLEGKQGNFKNLREFVFKNIDGYFKIYSKHTPINLVRDLPQGFSALEPLVDLPIGINITRFQTLL
ALHRSYLTPGDSSSGWTAGAAAYYVGYLQPRTFLLKYNENGTITDAVDCALDPLSETKCTLKSFTVEKGIYQTSNFRVQP
TESIVRFPNITNLCPFGEVFNATRFASVYAWNRKRISNCVADYSVLYNSASFSTFKCYGVSPTKLNDLCFTNVYADSFVIR
GDEVRQIAPGQTGKIADYNYKLPDDFTGCVIAWNSNNLDSKVGGNYNYLYRLFRKSNLKPFERDISTEIYQAGSTPCNG
VEGFNCYFPLQSYGFQPTNGVGYQPYRVVVLSFELLHAPATVCGPKKSTNLVKNKCVNFNFNGLTGTGVLTESNKKFLP
FQQFGRDIADITDAVRDPQTLEILDITPCSFGGVSVITPGTNTSNQVAVLYQNVNCTEVPVAIHADQLTPTWRVYSTGS
NVFQTRAGCLIGAEHVNNSYECDIPIGAGICASYQTQTNSPSRAGSVASQSIIAYTMSLGAENSVAYSNNSIAIPTNFTISV
TTEILPVSMTKTSVDCTMYICGDSTECSNLLLQYGSFCTQLNRALTGIAVEQDKNTQEVFAQVKQIYKTPPIKDFGGFNFS
QILPDPSKPSKRSFIEDLLFNKVTLADAGFIKQYGDCLGDIAARDLICAQKFNGLTVLPPLLTDEMIAQYTSALLAGTITSG
WTFGAGAALQIPFAMQMAYRFNGIGVTQNVLYENQKLIANQFNSAIGKIQDSLSSTPSALGKLQDVVNQNAQALNTL
VKQLSSNFGAISSVLNDILSRLDKVEAEVQIDRLITGRLQSLQTYVTQQLIRAAEIRASANLAATKMSECVLGQSKRVDFC
GKGYHLMSFPQSAPHGVVFLHVTYVPAQEKNFTTAPAICHDGKAHFPREGVFVSNGTHWFVTQRNFYEPQIITTDNTF
VSGNCDVVIGIVNNTVYDPLQPELDSFKEELDKYFKNHTSPDVDLGDISGINASVVNIQKEIDRLNEVAKNLNESLIDLQE
LGKYEQGSGYIPEAPRDGQAYVRKDGEWVLLSTFLGRSLEVLFQGPGSLPETGGGSDYKDDDDKGGGGSGGGGSGGG
GSGGGGSGGGGSHHHHHH
SEQ ID NO 45: SEQ ID NO 2 + A942P + D614N + N532P
MFVFLVLLPLVSSQCVNLTTRTQLPPAYTNSFTRGVYYPDKVFRSSVLHSTQDLFLPFFSNVTWFHAIHVSGTNGTKRFD
NPVLPFNDGVYFASTEKSNIIRGWIFGTTLDSKTQSLLIVNNATNVVIKVCEFQFCNDPFLGVYYHKNNKSWMESEFRVY
SSANNCTFEYVSQPFLMDLEGKQGNFKNLREFVFKNIDGYFKIYSKHTPINLVRDLPQGFSALEPLVDLPIGINITRFQTLL
ALHRSYLTPGDSSSGWTAGAAAYYVGYLQPRTFLLKYNENGTITDAVDCALDPLSETKCTLKSFTVEKGIYQTSNFRVQP
TESIVRFPNITNLCPFGEVFNATRFASVYAWNRKRISNCVADYSVLYNSASFSTFKCYGVSPTKLNDLCFTNVYADSFVIR
GDEVRQIAPGQTGKIADYNYKLPDDFTGCVIAWNSNNLDSKVGGNYNYLYRLFRKSNLKPFERDISTEIYQAGSTPCNG
VEGFNCYFPLQSYGFQPTNGVGYQPYRVVVLSFELLHAPATVCGPKKSTPLVKNKCVNFNFNGLTGTGVLTESNKKFLP
FQQFGRDIADTTDAVRDPQTLEILDITPCSFGGVSVITPGTNTSNQVAVLYQNVNCTEVPVAIHADQLTPTWRVYSTGS
NVFQTRAGCLIGAEHVNNSYECDIPIGAGICASYQTQTNSPSRAGSVASQSIIAYTMSLGAENSVAYSNNSIAIPTNFTISV
TTEILPVSMTKTSVDCTMYICGDSTECSNLLLQYGSFCTQLNRALTGIAVEQDKNTQEVFAQVKQIYKTPPIKDFGGFNFS
QILPDPSKPSKRSFIEDLLFNKVTLADAGFIKQYGDCLGDIAARDLICAQKFNGLTVLPPLLTDEMIAQYTSALLAGTITSG
WTFGAGAALQIPFAMQMAYRFNGIGVTQNVLYENQKLIANQFNSAIGKIQDSLSSTPSALGKLQDVVNQNAQALNTL
VKQLSSNFGAISSVLNDILSRLDKVEAEVQIDRLITGRLQSLQTYVTQQLIRAAEIRASANLAATKMSECVLGQSKRVDFC
GKGYHLMSFPQSAPHGVVFLHVTYVPAQEKNFTTAPAICHDGKAHFPREGVFVSNGTHWFVTQRNFYEPQIITTDNTF
VSGNCDVVIGIVNNTVYDPLQPELDSFKEELDKYFKNHTSPDVDLGDISGINASVVNIQKEIDRLNEVAKNLNESLIDLQE
LGKYEQGSGYIPEAPRDGQAYVRKDGEWVLLSTFLGRSLEVLFQGPGSLPETGGGSDYKDDDDKGGGGSGGGGSGGG
GSGGGGSGGGGSHHHHHH
SEQ ID NO 46: SEQ ID NO 2 + A942P + D614N + G880C + F888C
MFVFLVLLPLVSSQCVNLTTRTQLPPAYTNSFTRGVYYPDKVFRSSVLHSTQDLFLPFFSNVTWFHAIHVSGTNGTKRFD
NPVLPFNDGVYFASTEKSNIIRGWIFGTTLDSKTQSLLIVNNATNVVIKVCEFQFCNDPFLGVYYHKNNKSWMESEFRVY
SSANNCTFEYVSQPFLMDLEGKQGNFKNLREFVFKNIDGYFKIYSKHTPINLVRDLPQGFSALEPLVDLPIGINITRFQTLL
ALHRSYLTPGDSSSGWTAGAAAYYVGYLQPRTFLLKYNENGTITDAVDCALDPLSETKCTLKSFTVEKGIYQTSNFRVQP
TESIVRFPNITNLCPFGEVFNATRFASVYAWNRKRISNCVADYSVLYNSASFSTFKCYGVSPTKLNDLCFTNVYADSFVIR
GDEVRQIAPGQTGKIADYNYKLPDDFTGCVIAWNSNNLDSKVGGNYNYLYRLFRKSNLKPFERDISTEIYQAGSTPCNG
VEGFNCYFPLQSYGFQPTNGVGYQPYRVVVLSFELLHAPATVCGPKKSTNLVKNKCVNFNFNGLTGTGVLTESNKKFLP
FQQFGRDIADTTDAVRDPQTLEILDITPCSFGGVSVITPGTNTSNQVAVLYQNVNCTEVPVAIHADQLTPTWRVYSTGS
NVFQTRAGCLIGAEHVNNSYECDIPIGAGICASYQTQTNSPSRAGSVASQSIIAYTMSLGAENSVAYSNNSIAIPTNFTISV
TTEILPVSMTKTSVDCTMYICGDSTECSNLLLQYGSFCTQLNRALTGIAVEQDKNTQEVFAQVKQIYKTPPIKDFGGFNFS
QILPDPSKPSKRSFIEDLLFNKVTLADAGFIKQYGDCLGDIAARDLICAQKFNGLTVLPPLLTDEMIAQYTSALLACTITSG
WTCGAGAALQIPFAMQMAYRFNGIGVTQNVLYENQKLIANQFNSAIGKIQDSLSSTPSALGKLQDVVNQNAQALNTL
VKQLSSNFGAISSVLNDILSRLDKVEAEVQIDRLITGRLQSLQTYVTQQLIRAAEIRASANLAATKMSECVLGQSKRVDFC
GKGYHLMSFPQSAPHGVVFLHVTYVPAQEKNFTTAPAICHDGKAHFPREGVFVSNGTHWFVTQRNFYEPQIITTDNTF
VSGNCDVVIGIVNNTVYDPLQPELDSFKEELDKYFKNHTSPDVDLGDISGINASVVNIQKEIDRLNEVAKNLNESLIDLQE
LGKYEQGSGYIPEAPRDGQAYVRKDGEWVLLSTFLGRSLEVLFQGPGSLPETGGGSDYKDDDDKGGGGSGGGGSGGG
GSGGGGSGGGGSHHHHHH
SEQ ID NO 47: SEQ ID NO 2 + A942P + D614N + S884C + A893C
MFVFLVLLPLVSSQCVNLTTRTQLPPAYTNSFTRGVYYPDKVFRSSVLHSTQDLFLPFFSNVTWFHAIHVSGTNGTKRFD
NPVLPFNDGVYFASTEKSNIIRGWIFGTTLDSKTQSLLIVNNATNVVIKVCEFQFCNDPFLGVYYHKNNKSWMESEFRVY
SSANNCTFEYVSQPFLMDLEGKQGNFKNLREFVFKNIDGYFKIYSKHTPINLVRDLPQGFSALEPLVDLPIGINITRFQTLL
ALHRSYLTPGDSSSGWTAGAAAYYVGYLQPRTFLLKYNENGTITDAVDCALDPLSETKCTLKSFTVEKGIYQTSNFRVQP
TESIVRFPNITNLCPFGEVFNATRFASVYAWNRKRISNCVADYSVLYNSASFSTFKCYGVSPTKLNDLCFTNVYADSFVIR
GDEVRQIAPGQTGKIADYNYKLPDDFTGCVIAWNSNNLDSKVGGNYNYLYRLFRKSNLKPFERDISTEIYQAGSTPCNG
VEGFNCYFPLQSYGFQPTNGVGYQPYRVVVLSFELLHAPATVCGPKKSTNLVKNKCVNFNFNGLTGTGVLTESNKKFLP
FQQFGRDIADTTDAVRDPQTLEILDITPCSFGGVSVITPGTNTSNQVAVLYQNVNCTEVPVAIHADQLTPTWRVYSTGS
NVFQTRAGCLIGAEHVNNSYECDIPIGAGICASYQTQTNSPSRAGSVASQSIIAYTMSLGAENSVAYSNNSIAIPTNFTISV
TTEILPVSMTKTSVDCTMYICGDSTECSNLLLQYGSFCTQLNRALTGIAVEQDKNTQEVFAQVKQIYKTPPIKDFGGFNFS
QILPDPSKPSKRSFIEDLLFNKVTLADAGFIKQYGDCLGDIAARDLICAQKFNGLTVLPPLLTDEMIAQYTSALLAGTITCG
WTFGAGACLQIPFAMQMAYRFNGIGVTQNVLYENQKLIANQFNSAIGKIQDSLSSTPSALGKLQDVVNQNAQALNTL
VKQLSSNFGAISSVLNDILSRLDKVEAEVQIDRLITGRLQSLQTYVTQQLIRAAEIRASANLAATKMSECVLGQSKRVDFC
GKGYHLMSFPQSAPHGVVFLHVTYVPAQEKNFTTAPAICHDGKAHFPREGVFVSNGTHWFVTQRNFYEPQIITTDNTF
VSGNCDVVIGIVNNTVYDPLQPELDSFKEELDKYFKNHTSPDVDLGDISGINASVVNIQKEIDRLNEVAKNLNESLIDLQE
LGKYEQGSGYIPEAPRDGQAYVRKDGEWVLLSTFLGRSLEVLFQGPGSLPETGGGSDYKDDDDKGGGGSGGGGSGGG
GSGGGGSGGGGSHHHHHH
SEQ ID NO 48: SEQ ID NO 2 + A942P + T572I + N532P
MFVFLVLLPLVSSQCVNLTTRTQLPPAYTNSFTRGVYYPDKVFRSSVLHSTQDLFLPFFSNVTWFHAIHVSGTNGTKRFD
NPVLPFNDGVYFASTEKSNIIRGWIFGTTLDSKTQSLLIVNNATNVVIKVCEFQFCNDPFLGVYYHKNNKSWMESEFRVY
SSANNCTFEYVSQPFLMDLEGKQGNFKNLREFVFKNIDGYFKIYSKHTPINLVRDLPQGFSALEPLVDLPIGINITRFQTLL
ALHRSYLTPGDSSSGWTAGAAAYYVGYLQPRTFLLKYNENGTITDAVDCALDPLSETKCTLKSFTVEKGIYQTSNFRVQP
TESIVRFPNITNLCPFGEVFNATRFASVYAWNRKRISNCVADYSVLYNSASFSTFKCYGVSPTKLNDLCFTNVYADSFVIR
GDEVRQIAPGQTGKIADYNYKLPDDFTGCVIAWNSNNLDSKVGGNYNYLYRLFRKSNLKPFERDISTEIYQAGSTPCNG
VEGFNCYFPLQSYGFQPTNGVGYQPYRVVVLSFELLHAPATVCGPKKSTPLVKNKCVNFNFNGLTGTGVLTESNKKFLP
FQQFGRDIADITDAVRDPQTLEILDITPCSFGGVSVITPGTNTSNQVAVLYQDVNCTEVPVAIHADQLTPTWRVYSTGS
NVFQTRAGCLIGAEHVNNSYECDIPIGAGICASYQTQTNSPSRAGSVASQSIIAYTMSLGAENSVAYSNNSIAIPTNFTISV
TTEILPVSMTKTSVDCTMYICGDSTECSNLLLQYGSFCTQLNRALTGIAVEQDKNTQEVFAQVKQIYKTPPIKDFGGFNFS
QILPDPSKPSKRSFIEDLLFNKVTLADAGFIKQYGDCLGDIAARDLICAQKFNGLTVLPPLLTDEMIAQYTSALLAGTITSG
WTFGAGAALQIPFAMQMAYRFNGIGVTQNVLYENQKLIANQFNSAIGKIQDSLSSTPSALGKLQDVVNQNAQALNTL
VKQLSSNFGAISSVLNDILSRLDKVEAEVQIDRLITGRLQSLQTYVTQQLIRAAEIRASANLAATKMSECVLGQSKRVDFC
GKGYHLMSFPQSAPHGVVFLHVTYVPAQEKNFTTAPAICHDGKAHFPREGVFVSNGTHWFVTQRNFYEPQIITTDNTF
VSGNCDVVIGIVNNTVYDPLQPELDSFKEELDKYFKNHTSPDVDLGDISGINASVVNIQKEIDRLNEVAKNLNESLIDLQE
LGKYEQGSGYIPEAPRDGQAYVRKDGEWVLLSTFLGRSLEVLFQGPGSLPETGGGSDYKDDDDKGGGGSGGGGSGGG
GSGGGGSGGGGSHHHHHH
SEQ ID NO 49: SEQ ID NO 2 + A942P + T572I + G880C + F888C
MFVFLVLLPLVSSQCVNLTTRTQLPPAYTNSFTRGVYYPDKVFRSSVLHSTQDLFLPFFSNVTWFHAIHVSGTNGTKRFD
NPVLPFNDGVYFASTEKSNIIRGWIFGTTLDSKTQSLLIVNNATNVVIKVCEFQFCNDPFLGVYYHKNNKSWMESEFRVY
SSANNCTFEYVSQPFLMDLEGKQGNFKNLREFVFKNIDGYFKIYSKHTPINLVRDLPQGFSALEPLVDLPIGINITRFQTLL
ALHRSYLTPGDSSSGWTAGAAAYYVGYLQPRTFLLKYNENGTITDAVDCALDPLSETKCTLKSFTVEKGIYQTSNFRVQP
TESIVRFPNITNLCPFGEVFNATRFASVYAWNRKRISNCVADYSVLYNSASFSTFKCYGVSPTKLNDLCFTNVYADSFVIR
GDEVRQIAPGQTGKIADYNYKLPDDFTGCVIAWNSNNLDSKVGGNYNYLYRLFRKSNLKPFERDISTEIYQAGSTPCNG
VEGFNCYFPLQSYGFQPTNGVGYQPYRVVVLSFELLHAPATVCGPKKSTNLVKNKCVNFNFNGLTGTGVLTESNKKFLP
FQQFGRDIADITDAVRDPQTLEILDITPCSFGGVSVITPGTNTSNQVAVLYQDVNCTEVPVAIHADQLTPTWRVYSTGS
NVFQTRAGCLIGAEHVNNSYECDIPIGAGICASYQTQTNSPSRAGSVASQSIIAYTMSLGAENSVAYSNNSIAIPTNFTISV
TTEILPVSMTKTSVDCTMYICGDSTECSNLLLQYGSFCTQLNRALTGIAVEQDKNTQEVFAQVKQIYKTPPIKDFGGFNFS
QILPDPSKPSKRSFIEDLLFNKVTLADAGFIKQYGDCLGDIAARDLICAQKFNGLTVLPPLLTDEMIAQYTSALLACTITSG
WTCGAGAALQIPFAMQMAYRFNGIGVTQNVLYENQKLIANQFNSAIGKIQDSLSSTPSALGKLQDVVNQNAQALNTL
VKQLSSNFGAISSVLNDILSRLDKVEAEVQIDRLITGRLQSLQTYVTQQLIRAAEIRASANLAATKMSECVLGQSKRVDFC
GKGYHLMSFPQSAPHGVVFLHVTYVPAQEKNFTTAPAICHDGKAHFPREGVFVSNGTHWFVTQRNFYEPQIITTDNTF
VSGNCDVVIGIVNNTVYDPLQPELDSFKEELDKYFKNHTSPDVDLGDISGINASVVNIQKEIDRLNEVAKNLNESLIDLQE
LGKYEQGSGYIPEAPRDGQAYVRKDGEWVLLSTFLGRSLEVLFQGPGSLPETGGGSDYKDDDDKGGGGSGGGGSGGG
GSGGGGSGGGGSHHHHHH
SEQ ID NO 50: SEQ ID NO 2 + A942P + T572I + S884C + A893C
MFVFLVLLPLVSSQCVNLTTRTQLPPAYTNSFTRGVYYPDKVFRSSVLHSTQDLFLPFFSNVTWFHAIHVSGTNGTKRFD
NPVLPFNDGVYFASTEKSNIIRGWIFGTTLDSKTQSLLIVNNATNVVIKVCEFQFCNDPFLGVYYHKNNKSWMESEFRVY
SSANNCTFEYVSQPFLMDLEGKQGNFKNLREFVFKNIDGYFKIYSKHTPINLVRDLPQGFSALEPLVDLPIGINITRFQTLL
ALHRSYLTPGDSSSGWTAGAAAYYVGYLQPRTFLLKYNENGTITDAVDCALDPLSETKCTLKSFTVEKGIYQTSNFRVQP
TESIVRFPNITNLCPFGEVFNATRFASVYAWNRKRISNCVADYSVLYNSASFSTFKCYGVSPTKLNDLCFTNVYADSFVIR
GDEVRQIAPGQTGKIADYNYKLPDDFTGCVIAWNSNNLDSKVGGNYNYLYRLFRKSNLKPFERDISTEIYQAGSTPCNG
VEGFNCYFPLQSYGFQPTNGVGYQPYRVVVLSFELLHAPATVCGPKKSTNLVKNKCVNFNFNGLTGTGVLTESNKKFLP
FQQFGRDIADITDAVRDPQTLEILDITPCSFGGVSVITPGTNTSNQVAVLYQDVNCTEVPVAIHADQLTPTWRVYSTGS
NVFQTRAGCLIGAEHVNNSYECDIPIGAGICASYQTQTNSPSRAGSVASQSIIAYTMSLGAENSVAYSNNSIAIPTNFTISV
TTEILPVSMTKTSVDCTMYICGDSTECSNLLLQYGSFCTQLNRALTGIAVEQDKNTQEVFAQVKQIYKTPPIKDFGGFNFS
QILPDPSKPSKRSFIEDLLFNKVTLADAGFIKQYGDCLGDIAARDLICAQKFNGLTVLPPLLTDEMIAQYTSALLAGTITCG
WTFGAGACLQIPFAMQMAYRFNGIGVTQNVLYENQKLIANQFNSAIGKIQDSLSSTPSALGKLQDVVNQNAQALNTL
VKQLSSNFGAISSVLNDILSRLDKVEAEVQIDRLITGRLQSLQTYVTQQLIRAAEIRASANLAATKMSECVLGQSKRVDFC
GKGYHLMSFPQSAPHGVVFLHVTYVPAQEKNFTTAPAICHDGKAHFPREGVFVSNGTHWFVTQRNFYEPQIITTDNTF
VSGNCDVVIGIVNNTVYDPLQPELDSFKEELDKYFKNHTSPDVDLGDISGINASVVNIQKEIDRLNEVAKNLNESLIDLQE
LGKYEQGSGYIPEAPRDGQAYVRKDGEWVLLSTFLGRSLEVLFQGPGSLPETGGGSDYKDDDDKGGGGSGGGGSGGG
GSGGGGSGGGGSHHHHHH
SEQ ID NO 51: SEQ ID NO 2 + A942P + N532P + G880C + F888C
MFVFLVLLPLVSSQCVNLTTRTQLPPAYTNSFTRGVYYPDKVFRSSVLHSTQDLFLPFFSNVTWFHAIHVSGTNGTKRFD
NPVLPFNDGVYFASTEKSNIIRGWIFGTTLDSKTQSLLIVNNATNVVIKVCEFQFCNDPFLGVYYHKNNKSWMESEFRVY
SSANNCTFEYVSQPFLMDLEGKQGNFKNLREFVFKNIDGYFKIYSKHTPINLVRDLPQGFSALEPLVDLPIGINITRFQTLL
ALHRSYLTPGDSSSGWTAGAAAYYVGYLQPRTFLLKYNENGTITDAVDCALDPLSETKCTLKSFTVEKGIYQTSNFRVQP
TESIVRFPNITNLCPFGEVFNATRFASVYAWNRKRISNCVADYSVLYNSASFSTFKCYGVSPTKLNDLCFTNVYADSFVIR
GDEVRQIAPGQTGKIADYNYKLPDDFTGCVIAWNSNNLDSKVGGNYNYLYRLFRKSNLKPFERDISTEIYQAGSTPCNG
VEGFNCYFPLQSYGFQPTNGVGYQPYRVVVLSFELLHAPATVCGPKKSTPLVKNKCVNFNFNGLTGTGVLTESNKKFLP
FQQFGRDIADTTDAVRDPQTLEILDITPCSFGGVSVITPGTNTSNQVAVLYQDVNCTEVPVAIHADQLTPTWRVYSTGS
NVFQTRAGCLIGAEHVNNSYECDIPIGAGICASYQTQTNSPSRAGSVASQSIIAYTMSLGAENSVAYSNNSIAIPTNFTISV
TTEILPVSMTKTSVDCTMYICGDSTECSNLLLQYGSFCTQLNRALTGIAVEQDKNTQEVFAQVKQIYKTPPIKDFGGFNFS
QILPDPSKPSKRSFIEDLLFNKVTLADAGFIKQYGDCLGDIAARDLICAQKFNGLTVLPPLLTDEMIAQYTSALLACTITSG
WTCGAGAALQIPFAMQMAYRFNGIGVTQNVLYENQKLIANQFNSAIGKIQDSLSSTPSALGKLQDVVNQNAQALNTL
VKQLSSNFGAISSVLNDILSRLDKVEAEVQIDRLITGRLQSLQTYVTQQLIRAAEIRASANLAATKMSECVLGQSKRVDFC
GKGYHLMSFPQSAPHGVVFLHVTYVPAQEKNFTTAPAICHDGKAHFPREGVFVSNGTHWFVTQRNFYEPQIITTDNTF
VSGNCDVVIGIVNNTVYDPLQPELDSFKEELDKYFKNHTSPDVDLGDISGINASVVNIQKEIDRLNEVAKNLNESLIDLQE
LGKYEQGSGYIPEAPRDGQAYVRKDGEWVLLSTFLGRSLEVLFQGPGSLPETGGGSDYKDDDDKGGGGSGGGGSGGG
GSGGGGSGGGGSHHHHHH
SEQ ID NO 52: SEQ ID NO 2 + A942P + N532P + S884C + A893C
MFVFLVLLPLVSSQCVNLTTRTQLPPAYTNSFTRGVYYPDKVFRSSVLHSTQDLFLPFFSNVTWFHAIHVSGTNGTKRFD
NPVLPFNDGVYFASTEKSNIIRGWIFGTTLDSKTQSLLIVNNATNVVIKVCEFQFCNDPFLGVYYHKNNKSWMESEFRVY
SSANNCTFEYVSQPFLMDLEGKQGNFKNLREFVFKNIDGYFKIYSKHTPINLVRDLPQGFSALEPLVDLPIGINITRFQTLL
ALHRSYLTPGDSSSGWTAGAAAYYVGYLQPRTFLLKYNENGTITDAVDCALDPLSETKCTLKSFTVEKGIYQTSNFRVQP
TESIVRFPNITNLCPFGEVFNATRFASVYAWNRKRISNCVADYSVLYNSASFSTFKCYGVSPTKLNDLCFTNVYADSFVIR
GDEVRQIAPGQTGKIADYNYKLPDDFTGCVIAWNSNNLDSKVGGNYNYLYRLFRKSNLKPFERDISTEIYQAGSTPCNG
VEGFNCYFPLQSYGFQPTNGVGYQPYRVVVLSFELLHAPATVCGPKKSTPLVKNKCVNFNFNGLTGTGVLTESNKKFLP
FQQFGRDIADTTDAVRDPQTLEILDITPCSFGGVSVITPGTNTSNQVAVLYQDVNCTEVPVAIHADQLTPTWRVYSTGS
NVFQTRAGCLIGAEHVNNSYECDIPIGAGICASYQTQTNSPSRAGSVASQSIIAYTMSLGAENSVAYSNNSIAIPTNFTISV
TTEILPVSMTKTSVDCTMYICGDSTECSNLLLQYGSFCTQLNRALTGIAVEQDKNTQEVFAQVKQIYKTPPIKDFGGFNFS
QILPDPSKPSKRSFIEDLLFNKVTLADAGFIKQYGDCLGDIAARDLICAQKFNGLIVLPPLLTDEMIAQYTSALLAGTITCG
WTFGAGACLQIPFAMQMAYRFNGIGVTQNVLYENQKLIANQFNSAIGKIQDSLSSTPSALGKLQDVVNQNAQALNTL
VKQLSSNFGAISSVLNDILSRLDKVEAEVQIDRLITGRLQSLQTYVTQQLIRAAEIRASANLAATKMSECVLGQSKRVDFC
GKGYHLMSFPQSAPHGVVFLHVTYVPAQEKNFTTAPAICHDGKAHFPREGVFVSNGTHWFVTQRNFYEPQIITTDNTF
VSGNCDVVIGIVNNTVYDPLQPELDSFKEELDKYFKNHTSPDVDLGDISGINASVVNIQKEIDRLNEVAKNLNESLIDLQE
LGKYEQGSGYIPEAPRDGQAYVRKDGEWVLLSTFLGRSLEVLFQGPGSLPETGGGSDYKDDDDKGGGGSGGGGSGGG
GSGGGGSGGGGSHHHHHH
SEQ ID NO 53: SEQ ID NO 2 + A892P + D614N + T572I
MFVFLVLLPLVSSQCVNLTTRTQLPPAYTNSFTRGVYYPDKVFRSSVLHSTQDLFLPFFSNVTWFHAIHVSGTNGTKRFD
NPVLPFNDGVYFASTEKSNIIRGWIFGTTLDSKTQSLLIVNNATNVVIKVCEFQFCNDPFLGVYYHKNNKSWMESEFRVY
SSANNCTFEYVSQPFLMDLEGKQGNFKNLREFVFKNIDGYFKIYSKHTPINLVRDLPQGFSALEPLVDLPIGINITRFQTLL
ALHRSYLTPGDSSSGWTAGAAAYYVGYLQPRTFLLKYNENGTITDAVDCALDPLSETKCTLKSFTVEKGIYQTSNFRVQP
TESIVRFPNITNLCPFGEVFNATRFASVYAWNRKRISNCVADYSVLYNSASFSTFKCYGVSPTKLNDLCFTNVYADSFVIR
GDEVRQIAPGQTGKIADYNYKLPDDFTGCVIAWNSNNLDSKVGGNYNYLYRLFRKSNLKPFERDISTEIYQAGSTPCNG
VEGFNCYFPLQSYGFQPTNGVGYQPYRVVVLSFELLHAPATVCGPKKSTNLVKNKCVNFNFNGLTGTGVLTESNKKFLP
FQQFGRDIADITDAVRDPQTLEILDITPCSFGGVSVITPGTNTSNQVAVLYQNVNCTEVPVAIHADQLTPTWRVYSTGS
NVFQTRAGCLIGAEHVNNSYECDIPIGAGICASYQTQTNSPSRAGSVASQSIIAYTMSLGAENSVAYSNNSIAIPTNFTISV
TTEILPVSMTKTSVDCTMYICGDSTECSNLLLQYGSFCTQLNRALTGIAVEQDKNTQEVFAQVKQIYKTPPIKDFGGFNFS
QILPDPSKPSKRSFIEDLLFNKVTLADAGFIKQYGDCLGDIAARDLICAQKFNGLTVLPPLLTDEMIAQYTSALLAGTITSG
WTFGAGPALQIPFAMQMAYRFNGIGVTQNVLYENQKLIANQFNSAIGKIQDSLSSTASALGKLQDVVNQNAQALNTL
VKQLSSNFGAISSVLNDILSRLDKVEAEVQIDRLITGRLQSLQTYVTQQLIRAAEIRASANLAATKMSECVLGQSKRVDFC
GKGYHLMSFPQSAPHGVVFLHVTYVPAQEKNFTTAPAICHDGKAHFPREGVFVSNGTHWFVTQRNFYEPQIITTDNTF
VSGNCDVVIGIVNNTVYDPLQPELDSFKEELDKYFKNHTSPDVDLGDISGINASVVNIQKEIDRLNEVAKNLNESLIDLQE
LGKYEQGSGYIPEAPRDGQAYVRKDGEWVLLSTFLGRSLEVLFQGPGSLPETGGGSDYKDDDDKGGGGSGGGGSGGG
GSGGGGSGGGGSHHHHHH
SEQ ID NO 54: SEQ ID NO 2 + A892P + D614N + N532P
MFVFLVLLPLVSSQCVNLTTRTQLPPAYTNSFTRGVYYPDKVFRSSVLHSTQDLFLPFFSNVTWFHAIHVSGTNGTKRFD
NPVLPFNDGVYFASTEKSNIIRGWIFGTTLDSKTQSLLIVNNATNVVIKVCEFQFCNDPFLGVYYHKNNKSWMESEFRVY
SSANNCTFEYVSQPFLMDLEGKQGNFKNLREFVFKNIDGYFKIYSKHTPINLVRDLPQGFSALEPLVDLPIGINITRFQTLL
ALHRSYLTPGDSSSGWTAGAAAYYVGYLQPRTFLLKYNENGTITDAVDCALDPLSETKCTLKSFTVEKGIYQTSNFRVQP
TESIVRFPNITNLCPFGEVFNATRFASVYAWNRKRISNCVADYSVLYNSASFSTFKCYGVSPTKLNDLCFTNVYADSFVIR
GDEVRQIAPGQTGKIADYNYKLPDDFTGCVIAWNSNNLDSKVGGNYNYLYRLFRKSNLKPFERDISTEIYQAGSTPCNG
VEGFNCYFPLQSYGFQPTNGVGYQPYRVVVLSFELLHAPATVCGPKKSTPLVKNKCVNFNFNGLTGTGVLTESNKKFLP
FQQFGRDIADTTDAVRDPQTLEILDITPCSFGGVSVITPGTNTSNQVAVLYQNVNCTEVPVAIHADQLTPTWRVYSTGS
NVFQTRAGCLIGAEHVNNSYECDIPIGAGICASYQTQTNSPSRAGSVASQSIIAYTMSLGAENSVAYSNNSIAIPTNFTISV
TTEILPVSMTKTSVDCTMYICGDSTECSNLLLQYGSFCTQLNRALTGIAVEQDKNTQEVFAQVKQIYKTPPIKDFGGFNFS
QILPDPSKPSKRSFIEDLLFNKVTLADAGFIKQYGDCLGDIAARDLICAQKFNGLTVLPPLLTDEMIAQYTSALLAGTITSG
WTFGAGPALQIPFAMQMAYRFNGIGVTQNVLYENQKLIANQFNSAIGKIQDSLSSTASALGKLQDVVNQNAQALNTL
VKQLSSNFGAISSVLNDILSRLDKVEAEVQIDRLITGRLQSLQTYVTQQLIRAAEIRASANLAATKMSECVLGQSKRVDFC
GKGYHLMSFPQSAPHGVVFLHVTYVPAQEKNFTTAPAICHDGKAHFPREGVFVSNGTHWFVTQRNFYEPQIITTDNTF
VSGNCDVVIGIVNNTVYDPLQPELDSFKEELDKYFKNHTSPDVDLGDISGINASVVNIQKEIDRLNEVAKNLNESLIDLQE
LGKYEQGSGYIPEAPRDGQAYVRKDGEWVLLSTFLGRSLEVLFQGPGSLPETGGGSDYKDDDDKGGGGSGGGGSGGG
GSGGGGSGGGGSHHHHHH
SEQ ID NO 55: SEQ ID NO 2 + A892P + D614N + G880C + F888C
MFVFLVLLPLVSSQCVNLTTRTQLPPAYTNSFTRGVYYPDKVFRSSVLHSTQDLFLPFFSNVTWFHAIHVSGTNGTKRFD
NPVLPFNDGVYFASTEKSNIIRGWIFGTTLDSKTQSLLIVNNATNVVIKVCEFQFCNDPFLGVYYHKNNKSWMESEFRVY
SSANNCTFEYVSQPFLMDLEGKQGNFKNLREFVFKNIDGYFKIYSKHTPINLVRDLPQGFSALEPLVDLPIGINITRFQTLL
ALHRSYLTPGDSSSGWTAGAAAYYVGYLQPRTFLLKYNENGTITDAVDCALDPLSETKCTLKSFTVEKGIYQTSNFRVQP
TESIVRFPNITNLCPFGEVFNATRFASVYAWNRKRISNCVADYSVLYNSASFSTFKCYGVSPTKLNDLCFTNVYADSFVIR
GDEVRQIAPGQTGKIADYNYKLPDDFTGCVIAWNSNNLDSKVGGNYNYLYRLFRKSNLKPFERDISTEIYQAGSTPCNG
VEGFNCYFPLQSYGFQPTNGVGYQPYRVVVLSFELLHAPATVCGPKKSTNLVKNKCVNFNFNGLTGTGVLTESNKKFLP
FQQFGRDIADTTDAVRDPQTLEILDITPCSFGGVSVITPGTNTSNQVAVLYQNVNCTEVPVAIHADQLTPTWRVYSTGS
NVFQTRAGCLIGAEHVNNSYECDIPIGAGICASYQTQTNSPSRAGSVASQSIIAYTMSLGAENSVAYSNNSIAIPTNFTISV
TTEILPVSMTKTSVDCTMYICGDSTECSNLLLQYGSFCTQLNRALTGIAVEQDKNTQEVFAQVKQIYKTPPIKDFGGFNFS
QILPDPSKPSKRSFIEDLLFNKVTLADAGFIKQYGDCLGDIAARDLICAQKFNGLTVLPPLLTDEMIAQYTSALLACTITSG
WTCGAGPALQIPFAMQMAYRFNGIGVTQNVLYENQKLIANQFNSAIGKIQDSLSSTASALGKLQDVVNQNAQALNTL
VKQLSSNFGAISSVLNDILSRLDKVEAEVQIDRLITGRLQSLQTYVTQQLIRAAEIRASANLAATKMSECVLGQSKRVDFC
GKGYHLMSFPQSAPHGVVFLHVTYVPAQEKNFTTAPAICHDGKAHFPREGVFVSNGTHWFVTQRNFYEPQIITTDNTF
VSGNCDVVIGIVNNTVYDPLQPELDSFKEELDKYFKNHTSPDVDLGDISGINASVVNIQKEIDRLNEVAKNLNESLIDLQE
LGKYEQGSGYIPEAPRDGQAYVRKDGEWVLLSTFLGRSLEVLFQGPGSLPETGGGSDYKDDDDKGGGGSGGGGSGGG
GSGGGGSGGGGSHHHHHH
SEQ ID NO 56: SEQ ID NO 2 + A892P + D614N + S884C + A893C
MFVFLVLLPLVSSQCVNLTTRTQLPPAYTNSFTRGVYYPDKVFRSSVLHSTQDLFLPFFSNVTWFHAIHVSGTNGTKRFD
NPVLPFNDGVYFASTEKSNIIRGWIFGTTLDSKTQSLLIVNNATNVVIKVCEFQFCNDPFLGVYYHKNNKSWMESEFRVY
SSANNCTFEYVSQPFLMDLEGKQGNFKNLREFVFKNIDGYFKIYSKHTPINLVRDLPQGFSALEPLVDLPIGINITRFQTLL
ALHRSYLTPGDSSSGWTAGAAAYYVGYLQPRTFLLKYNENGTITDAVDCALDPLSETKCTLKSFTVEKGIYQTSNFRVQP
TESIVRFPNITNLCPFGEVFNATRFASVYAWNRKRISNCVADYSVLYNSASFSTFKCYGVSPTKLNDLCFTNVYADSFVIR
GDEVRQIAPGQTGKIADYNYKLPDDFTGCVIAWNSNNLDSKVGGNYNYLYRLFRKSNLKPFERDISTEIYQAGSTPCNG
VEGFNCYFPLQSYGFQPTNGVGYQPYRVVVLSFELLHAPATVCGPKKSTNLVKNKCVNFNFNGLTGTGVLTESNKKFLP
FQQFGRDIADTTDAVRDPQTLEILDITPCSFGGVSVITPGTNTSNQVAVLYQNVNCTEVPVAIHADQLTPTWRVYSTGS
NVFQTRAGCLIGAEHVNNSYECDIPIGAGICASYQTQTNSPSRAGSVASQSIIAYTMSLGAENSVAYSNNSIAIPTNFTISV
TTEILPVSMTKTSVDCTMYICGDSTECSNLLLQYGSFCTQLNRALTGIAVEQDKNTQEVFAQVKQIYKTPPIKDFGGFNFS
QILPDPSKPSKRSFIEDLLFNKVTLADAGFIKQYGDCLGDIAARDLICAQKFNGLTVLPPLLTDEMIAQYTSALLAGTITCG
WTFGAGPCLQIPFAMQMAYRFNGIGVTQNVLYENQKLIANQFNSAIGKIQDSLSSTASALGKLQDVVNQNAQALNTL
VKQLSSNFGAISSVLNDILSRLDKVEAEVQIDRLITGRLQSLQTYVTQQLIRAAEIRASANLAATKMSECVLGQSKRVDFC
GKGYHLMSFPQSAPHGVVFLHVTYVPAQEKNFTTAPAICHDGKAHFPREGVFVSNGTHWFVTQRNFYEPQIITTDNTF
VSGNCDVVIGIVNNTVYDPLQPELDSFKEELDKYFKNHTSPDVDLGDISGINASVVNIQKEIDRLNEVAKNLNESLIDLQE
LGKYEQGSGYIPEAPRDGQAYVRKDGEWVLLSTFLGRSLEVLFQGPGSLPETGGGSDYKDDDDKGGGGSGGGGSGGG
GSGGGGSGGGGSHHHHHH
SEQ ID NO 57: SEQ ID NO 2 + A892P + T572I + N532P
MFVFLVLLPLVSSQCVNLTTRTQLPPAYTNSFTRGVYYPDKVFRSSVLHSTQDLFLPFFSNVTWFHAIHVSGTNGTKRFD
NPVLPFNDGVYFASTEKSNIIRGWIFGTTLDSKTQSLLIVNNATNVVIKVCEFQFCNDPFLGVYYHKNNKSWMESEFRVY
SSANNCTFEYVSQPFLMDLEGKQGNFKNLREFVFKNIDGYFKIYSKHTPINLVRDLPQGFSALEPLVDLPIGINITRFQTLL
ALHRSYLTPGDSSSGWTAGAAAYYVGYLQPRTFLLKYNENGTITDAVDCALDPLSETKCTLKSFTVEKGIYQTSNFRVQP
TESIVRFPNITNLCPFGEVFNATRFASVYAWNRKRISNCVADYSVLYNSASFSTFKCYGVSPTKLNDLCFTNVYADSFVIR
GDEVRQIAPGQTGKIADYNYKLPDDFTGCVIAWNSNNLDSKVGGNYNYLYRLFRKSNLKPFERDISTEIYQAGSTPCNG
VEGFNCYFPLQSYGFQPTNGVGYQPYRVVVLSFELLHAPATVCGPKKSTPLVKNKCVNFNFNGLTGTGVLTESNKKFLP
FQQFGRDIADITDAVRDPQTLEILDITPCSFGGVSVITPGTNTSNQVAVLYQDVNCTEVPVAIHADQLTPTWRVYSTGS
NVFQTRAGCLIGAEHVNNSYECDIPIGAGICASYQTQTNSPSRAGSVASQSIIAYTMSLGAENSVAYSNNSIAIPTNFTISV
TTEILPVSMTKTSVDCTMYICGDSTECSNLLLQYGSFCTQLNRALTGIAVEQDKNTQEVFAQVKQIYKTPPIKDFGGFNFS
QILPDPSKPSKRSFIEDLLFNKVTLADAGFIKQYGDCLGDIAARDLICAQKFNGLTVLPPLLTDEMIAQYTSALLAGTITSG
WTFGAGPALQIPFAMQMAYRFNGIGVTQNVLYENQKLIANQFNSAIGKIQDSLSSTASALGKLQDVVNQNAQALNTL
VKQLSSNFGAISSVLNDILSRLDKVEAEVQIDRLITGRLQSLQTYVTQQLIRAAEIRASANLAATKMSECVLGQSKRVDFC
GKGYHLMSFPQSAPHGVVFLHVTYVPAQEKNFTTAPAICHDGKAHFPREGVFVSNGTHWFVTQRNFYEPQIITTDNTF
VSGNCDVVIGIVNNTVYDPLQPELDSFKEELDKYFKNHTSPDVDLGDISGINASVVNIQKEIDRLNEVAKNLNESLIDLQE
LGKYEQGSGYIPEAPRDGQAYVRKDGEWVLLSTFLGRSLEVLFQGPGSLPETGGGSDYKDDDDKGGGGSGGGGSGGG
GSGGGGSGGGGSHHHHHH
SEQ ID NO 58: SEQ ID NO 2 + A892P + T572I + G880C + F888C
MFVFLVLLPLVSSQCVNLTTRTQLPPAYTNSFTRGVYYPDKVFRSSVLHSTQDLFLPFFSNVTWFHAIHVSGTNGTKRFD
NPVLPFNDGVYFASTEKSNIIRGWIFGTTLDSKTQSLLIVNNATNVVIKVCEFQFCNDPFLGVYYHKNNKSWMESEFRVY
SSANNCTFEYVSQPFLMDLEGKQGNFKNLREFVFKNIDGYFKIYSKHTPINLVRDLPQGFSALEPLVDLPIGINITRFQTLL
ALHRSYLTPGDSSSGWTAGAAAYYVGYLQPRTFLLKYNENGTITDAVDCALDPLSETKCTLKSFTVEKGIYQTSNFRVQP
TESIVRFPNITNLCPFGEVFNATRFASVYAWNRKRISNCVADYSVLYNSASFSTFKCYGVSPTKLNDLCFTNVYADSFVIR
GDEVRQIAPGQTGKIADYNYKLPDDFTGCVIAWNSNNLDSKVGGNYNYLYRLFRKSNLKPFERDISTEIYQAGSTPCNG
VEGFNCYFPLQSYGFQPTNGVGYQPYRVVVLSFELLHAPATVCGPKKSTNLVKNKCVNFNFNGLTGTGVLTESNKKFLP
FQQFGRDIADITDAVRDPQTLEILDITPCSFGGVSVITPGTNTSNQVAVLYQDVNCTEVPVAIHADQLTPTWRVYSTGS
NVFQTRAGCLIGAEHVNNSYECDIPIGAGICASYQTQTNSPSRAGSVASQSIIAYTMSLGAENSVAYSNNSIAIPTNFTISV
TTEILPVSMTKTSVDCTMYICGDSTECSNLLLQYGSFCTQLNRALTGIAVEQDKNTQEVFAQVKQIYKTPPIKDFGGFNFS
QILPDPSKPSKRSFIEDLLFNKVTLADAGFIKQYGDCLGDIAARDLICAQKFNGLTVLPPLLTDEMIAQYTSALLACTITSG
WTCGAGPALQIPFAMQMAYRFNGIGVTQNVLYENQKLIANQFNSAIGKIQDSLSSTASALGKLQDVVNQNAQALNTL
VKQLSSNFGAISSVLNDILSRLDKVEAEVQIDRLITGRLQSLQTYVTQQLIRAAEIRASANLAATKMSECVLGQSKRVDFC
GKGYHLMSFPQSAPHGVVFLHVTYVPAQEKNFTTAPAICHDGKAHFPREGVFVSNGTHWFVTQRNFYEPQIITTDNTF
VSGNCDVVIGIVNNTVYDPLQPELDSFKEELDKYFKNHTSPDVDLGDISGINASVVNIQKEIDRLNEVAKNLNESLIDLQE
LGKYEQGSGYIPEAPRDGQAYVRKDGEWVLLSTFLGRSLEVLFQGPGSLPETGGGSDYKDDDDKGGGGSGGGGSGGG
GSGGGGSGGGGSHHHHHH
SEQ ID NO 59: SEQ ID NO 2 + A892P + T572I + S884C + A893C
MFVFLVLLPLVSSQCVNLTTRTQLPPAYTNSFTRGVYYPDKVFRSSVLHSTQDLFLPFFSNVTWFHAIHVSGTNGTKRFD
NPVLPFNDGVYFASTEKSNIIRGWIFGTTLDSKTQSLLIVNNATNVVIKVCEFQFCNDPFLGVYYHKNNKSWMESEFRVY
SSANNCTFEYVSQPFLMDLEGKQGNFKNLREFVFKNIDGYFKIYSKHTPINLVRDLPQGFSALEPLVDLPIGINITRFQTLL
ALHRSYLTPGDSSSGWTAGAAAYYVGYLQPRTFLLKYNENGTITDAVDCALDPLSETKCTLKSFTVEKGIYQTSNFRVQP
TESIVRFPNITNLCPFGEVFNATRFASVYAWNRKRISNCVADYSVLYNSASFSTFKCYGVSPTKLNDLCFTNVYADSFVIR
GDEVRQIAPGQTGKIADYNYKLPDDFTGCVIAWNSNNLDSKVGGNYNYLYRLFRKSNLKPFERDISTEIYQAGSTPCNG
VEGFNCYFPLQSYGFQPTNGVGYQPYRVVVLSFELLHAPATVCGPKKSTNLVKNKCVNFNFNGLTGTGVLTESNKKFLP
FQQFGRDIADITDAVRDPQTLEILDITPCSFGGVSVITPGTNTSNQVAVLYQDVNCTEVPVAIHADQLTPTWRVYSTGS
NVFQTRAGCLIGAEHVNNSYECDIPIGAGICASYQTQTNSPSRAGSVASQSIIAYTMSLGAENSVAYSNNSIAIPTNFTISV
TTEILPVSMTKTSVDCTMYICGDSTECSNLLLQYGSFCTQLNRALTGIAVEQDKNTQEVFAQVKQIYKTPPIKDFGGFNFS
QILPDPSKPSKRSFIEDLLFNKVTLADAGFIKQYGDCLGDIAARDLICAQKFNGLTVLPPLLTDEMIAQYTSALLAGTITCG
WTFGAGPCLQIPFAMQMAYRFNGIGVTQNVLYENQKLIANQFNSAIGKIQDSLSSTASALGKLQDVVNQNAQALNTL
VKQLSSNFGAISSVLNDILSRLDKVEAEVQIDRLITGRLQSLQTYVTQQLIRAAEIRASANLAATKMSECVLGQSKRVDFC
GKGYHLMSFPQSAPHGVVFLHVTYVPAQEKNFTTAPAICHDGKAHFPREGVFVSNGTHWFVTQRNFYEPQIITTDNTF
VSGNCDVVIGIVNNTVYDPLQPELDSFKEELDKYFKNHTSPDVDLGDISGINASVVNIQKEIDRLNEVAKNLNESLIDLQE
LGKYEQGSGYIPEAPRDGQAYVRKDGEWVLLSTFLGRSLEVLFQGPGSLPETGGGSDYKDDDDKGGGGSGGGGSGGG
GSGGGGSGGGGSHHHHHH
SEQ ID NO 60: SEQ ID NO 2 + A892P + N532P + G880C + F888C
MFVFLVLLPLVSSQCVNLTTRTQLPPAYTNSFTRGVYYPDKVFRSSVLHSTQDLFLPFFSNVTWFHAIHVSGTNGTKRFD
NPVLPFNDGVYFASTEKSNIIRGWIFGTTLDSKTQSLLIVNNATNVVIKVCEFQFCNDPFLGVYYHKNNKSWMESEFRVY
SSANNCTFEYVSQPFLMDLEGKQGNFKNLREFVFKNIDGYFKIYSKHTPINLVRDLPQGFSALEPLVDLPIGINITRFQTLL
ALHRSYLTPGDSSSGWTAGAAAYYVGYLQPRTFLLKYNENGTITDAVDCALDPLSETKCTLKSFTVEKGIYQTSNFRVQP
TESIVRFPNITNLCPFGEVFNATRFASVYAWNRKRISNCVADYSVLYNSASFSTFKCYGVSPTKLNDLCFTNVYADSFVIR
GDEVRQIAPGQTGKIADYNYKLPDDFTGCVIAWNSNNLDSKVGGNYNYLYRLFRKSNLKPFERDISTEIYQAGSTPCNG
VEGFNCYFPLQSYGFQPTNGVGYQPYRVVVLSFELLHAPATVCGPKKSTPLVKNKCVNFNFNGLTGTGVLTESNKKFLP
FQQFGRDIADTTDAVRDPQTLEILDITPCSFGGVSVITPGTNTSNQVAVLYQDVNCTEVPVAIHADQLTPTWRVYSTGS
NVFQTRAGCLIGAEHVNNSYECDIPIGAGICASYQTQTNSPSRAGSVASQSIIAYTMSLGAENSVAYSNNSIAIPTNFTISV
TTEILPVSMTKTSVDCTMYICGDSTECSNLLLQYGSFCTQLNRALTGIAVEQDKNTQEVFAQVKQIYKTPPIKDFGGFNFS
QILPDPSKPSKRSFIEDLLFNKVTLADAGFIKQYGDCLGDIAARDLICAQKFNGLTVLPPLLTDEMIAQYTSALLACTITSG
WTCGAGPALQIPFAMQMAYRFNGIGVTQNVLYENQKLIANQFNSAIGKIQDSLSSTASALGKLQDVVNQNAQALNTL
VKQLSSNFGAISSVLNDILSRLDKVEAEVQIDRLITGRLQSLQTYVTQQLIRAAEIRASANLAATKMSECVLGQSKRVDFC
GKGYHLMSFPQSAPHGVVFLHVTYVPAQEKNFTTAPAICHDGKAHFPREGVFVSNGTHWFVTQRNFYEPQIITTDNTF
VSGNCDVVIGIVNNTVYDPLQPELDSFKEELDKYFKNHTSPDVDLGDISGINASVVNIQKEIDRLNEVAKNLNESLIDLQE
LGKYEQGSGYIPEAPRDGQAYVRKDGEWVLLSTFLGRSLEVLFQGPGSLPETGGGSDYKDDDDKGGGGSGGGGSGGG
GSGGGGSGGGGSHHHHHH
SEQ ID NO 61: SEQ ID NO 2 + A892P + N532P + S884C + A893C
MFVFLVLLPLVSSQCVNLTTRTQLPPAYTNSFTRGVYYPDKVFRSSVLHSTQDLFLPFFSNVTWFHAIHVSGTNGTKRFD
NPVLPFNDGVYFASTEKSNIIRGWIFGTTLDSKTQSLLIVNNATNVVIKVCEFQFCNDPFLGVYYHKNNKSWMESEFRVY
SSANNCTFEYVSQPFLMDLEGKQGNFKNLREFVFKNIDGYFKIYSKHTPINLVRDLPQGFSALEPLVDLPIGINITRFQTLL
ALHRSYLTPGDSSSGWTAGAAAYYVGYLQPRTFLLKYNENGTITDAVDCALDPLSETKCTLKSFTVEKGIYQTSNFRVQP
TESIVRFPNITNLCPFGEVFNATRFASVYAWNRKRISNCVADYSVLYNSASFSTFKCYGVSPTKLNDLCFTNVYADSFVIR
GDEVRQIAPGQTGKIADYNYKLPDDFTGCVIAWNSNNLDSKVGGNYNYLYRLFRKSNLKPFERDISTEIYQAGSTPCNG
VEGFNCYFPLQSYGFQPTNGVGYQPYRVVVLSFELLHAPATVCGPKKSTPLVKNKCVNFNFNGLTGTGVLTESNKKFLP
FQQFGRDIADTTDAVRDPQTLEILDITPCSFGGVSVITPGTNTSNQVAVLYQDVNCTEVPVAIHADQLTPTWRVYSTGS
NVFQTRAGCLIGAEHVNNSYECDIPIGAGICASYQTQTNSPSRAGSVASQSIIAYTMSLGAENSVAYSNNSIAIPTNFTISV
TTEILPVSMTKTSVDCTMYICGDSTECSNLLLQYGSFCTQLNRALTGIAVEQDKNTQEVFAQVKQIYKTPPIKDFGGFNFS
QILPDPSKPSKRSFIEDLLFNKVTLADAGFIKQYGDCLGDIAARDLICAQKFNGLTVLPPLLTDEMIAQYTSALLAGTITCG
WTFGAGPCLQIPFAMQMAYRFNGIGVTQNVLYENQKLIANQFNSAIGKIQDSLSSTASALGKLQDVVNQNAQALNTL
VKQLSSNFGAISSVLNDILSRLDKVEAEVQIDRLITGRLQSLQTYVTQQLIRAAEIRASANLAATKMSECVLGQSKRVDFC
GKGYHLMSFPQSAPHGVVFLHVTYVPAQEKNFTTAPAICHDGKAHFPREGVFVSNGTHWFVTQRNFYEPQIITTDNTF
VSGNCDVVIGIVNNTVYDPLQPELDSFKEELDKYFKNHTSPDVDLGDISGINASVVNIQKEIDRLNEVAKNLNESLIDLQE
LGKYEQGSGYIPEAPRDGQAYVRKDGEWVLLSTFLGRSLEVLFQGPGSLPETGGGSDYKDDDDKGGGGSGGGGSGGG
GSGGGGSGGGGSHHHHHH
SEQ ID NO 62: SEQ ID NO 2 + D614N + T572I + N532P
MFVFLVLLPLVSSQCVNLTTRTQLPPAYTNSFTRGVYYPDKVFRSSVLHSTQDLFLPFFSNVTWFHAIHVSGTNGTKRFD
NPVLPFNDGVYFASTEKSNIIRGWIFGTTLDSKTQSLLIVNNATNVVIKVCEFQFCNDPFLGVYYHKNNKSWMESEFRVY
SSANNCTFEYVSQPFLMDLEGKQGNFKNLREFVFKNIDGYFKIYSKHTPINLVRDLPQGFSALEPLVDLPIGINITRFQTLL
ALHRSYLTPGDSSSGWTAGAAAYYVGYLQPRTFLLKYNENGTITDAVDCALDPLSETKCTLKSFTVEKGIYQTSNFRVQP
TESIVRFPNITNLCPFGEVFNATRFASVYAWNRKRISNCVADYSVLYNSASFSTFKCYGVSPTKLNDLCFTNVYADSFVIR
GDEVRQIAPGQTGKIADYNYKLPDDFTGCVIAWNSNNLDSKVGGNYNYLYRLFRKSNLKPFERDISTEIYQAGSTPCNG
VEGFNCYFPLQSYGFQPTNGVGYQPYRVVVLSFELLHAPATVCGPKKSTPLVKNKCVNFNFNGLTGTGVLTESNKKFLP
FQQFGRDIADITDAVRDPQTLEILDITPCSFGGVSVITPGTNTSNQVAVLYQNVNCTEVPVAIHADQLTPTWRVYSTGS
NVFQTRAGCLIGAEHVNNSYECDIPIGAGICASYQTQTNSPSRAGSVASQSIIAYTMSLGAENSVAYSNNSIAIPTNFTISV
TTEILPVSMTKTSVDCTMYICGDSTECSNLLLQYGSFCTQLNRALTGIAVEQDKNTQEVFAQVKQIYKTPPIKDFGGFNFS
QILPDPSKPSKRSFIEDLLFNKVTLADAGFIKQYGDCLGDIAARDLICAQKFNGLTVLPPLLTDEMIAQYTSALLAGTITSG
WTFGAGAALQIPFAMQMAYRFNGIGVTQNVLYENQKLIANQFNSAIGKIQDSLSSTASALGKLQDVVNQNAQALNTL
VKQLSSNFGAISSVLNDILSRLDKVEAEVQIDRLITGRLQSLQTYVTQQLIRAAEIRASANLAATKMSECVLGQSKRVDFC
GKGYHLMSFPQSAPHGVVFLHVTYVPAQEKNFTTAPAICHDGKAHFPREGVFVSNGTHWFVTQRNFYEPQIITTDNTF
VSGNCDVVIGIVNNTVYDPLQPELDSFKEELDKYFKNHTSPDVDLGDISGINASVVNIQKEIDRLNEVAKNLNESLIDLQE
LGKYEQGSGYIPEAPRDGQAYVRKDGEWVLLSTFLGRSLEVLFQGPGSLPETGGGSDYKDDDDKGGGGSGGGGSGGG
GSGGGGSGGGGSHHHHHH
SEQ ID NO 63: SEQ ID NO 2 + D614N + T572I + G880C + F888C
MFVFLVLLPLVSSQCVNLTTRTQLPPAYTNSFTRGVYYPDKVFRSSVLHSTQDLFLPFFSNVTWFHAIHVSGTNGTKRFD
NPVLPFNDGVYFASTEKSNIIRGWIFGTTLDSKTQSLLIVNNATNVVIKVCEFQFCNDPFLGVYYHKNNKSWMESEFRVY
SSANNCTFEYVSQPFLMDLEGKQGNFKNLREFVFKNIDGYFKIYSKHTPINLVRDLPQGFSALEPLVDLPIGINITRFQTLL
ALHRSYLTPGDSSSGWTAGAAAYYVGYLQPRTFLLKYNENGTITDAVDCALDPLSETKCTLKSFTVEKGIYQTSNFRVQP
TESIVRFPNITNLCPFGEVFNATRFASVYAWNRKRISNCVADYSVLYNSASFSTFKCYGVSPTKLNDLCFTNVYADSFVIR
GDEVRQIAPGQTGKIADYNYKLPDDFTGCVIAWNSNNLDSKVGGNYNYLYRLFRKSNLKPFERDISTEIYQAGSTPCNG
VEGFNCYFPLQSYGFQPTNGVGYQPYRVVVLSFELLHAPATVCGPKKSTNLVKNKCVNFNFNGLTGTGVLTESNKKFLP
FQQFGRDIADITDAVRDPQTLEILDITPCSFGGVSVITPGTNTSNQVAVLYQNVNCTEVPVAIHADQLTPTWRVYSTGS
NVFQTRAGCLIGAEHVNNSYECDIPIGAGICASYQTQTNSPSRAGSVASQSIIAYTMSLGAENSVAYSNNSIAIPTNFTISV
TTEILPVSMTKTSVDCTMYICGDSTECSNLLLQYGSFCTQLNRALTGIAVEQDKNTQEVFAQVKQIYKTPPIKDFGGFNFS
QILPDPSKPSKRSFIEDLLFNKVTLADAGFIKQYGDCLGDIAARDLICAQKFNGLTVLPPLLTDEMIAQYTSALLACTITSG
WTCGAGAALQIPFAMQMAYRFNGIGVTQNVLYENQKLIANQFNSAIGKIQDSLSSTASALGKLQDVVNQNAQALNTL
VKQLSSNFGAISSVLNDILSRLDKVEAEVQIDRLITGRLQSLQTYVTQQLIRAAEIRASANLAATKMSECVLGQSKRVDFC
GKGYHLMSFPQSAPHGVVFLHVTYVPAQEKNFTTAPAICHDGKAHFPREGVFVSNGTHWFVTQRNFYEPQIITTDNTF
VSGNCDVVIGIVNNTVYDPLQPELDSFKEELDKYFKNHTSPDVDLGDISGINASVVNIQKEIDRLNEVAKNLNESLIDLQE
LGKYEQGSGYIPEAPRDGQAYVRKDGEWVLLSTFLGRSLEVLFQGPGSLPETGGGSDYKDDDDKGGGGSGGGGSGGG
GSGGGGSGGGGSHHHHHH
SEQ ID NO 64: SEQ ID NO 2 + D614N + T572I + S884C + A893C
MFVFLVLLPLVSSQCVNLTTRTQLPPAYTNSFTRGVYYPDKVFRSSVLHSTQDLFLPFFSNVTWFHAIHVSGTNGTKRFD
NPVLPFNDGVYFASTEKSNIIRGWIFGTTLDSKTQSLLIVNNATNVVIKVCEFQFCNDPFLGVYYHKNNKSWMESEFRVY
SSANNCTFEYVSQPFLMDLEGKQGNFKNLREFVFKNIDGYFKIYSKHTPINLVRDLPQGFSALEPLVDLPIGINITRFQTLL
ALHRSYLTPGDSSSGWTAGAAAYYVGYLQPRTFLLKYNENGTITDAVDCALDPLSETKCTLKSFTVEKGIYQTSNFRVQP
TESIVRFPNITNLCPFGEVFNATRFASVYAWNRKRISNCVADYSVLYNSASFSTFKCYGVSPTKLNDLCFTNVYADSFVIR
GDEVRQIAPGQTGKIADYNYKLPDDFTGCVIAWNSNNLDSKVGGNYNYLYRLFRKSNLKPFERDISTEIYQAGSTPCNG
VEGFNCYFPLQSYGFQPTNGVGYQPYRVVVLSFELLHAPATVCGPKKSTNLVKNKCVNFNFNGLTGTGVLTESNKKFLP
FQQFGRDIADITDAVRDPQTLEILDITPCSFGGVSVITPGTNTSNQVAVLYQNVNCTEVPVAIHADQLTPTWRVYSTGS
NVFQTRAGCLIGAEHVNNSYECDIPIGAGICASYQTQTNSPSRAGSVASQSIIAYTMSLGAENSVAYSNNSIAIPTNFTISV
TTEILPVSMTKTSVDCTMYICGDSTECSNLLLQYGSFCTQLNRALTGIAVEQDKNTQEVFAQVKQIYKTPPIKDFGGFNFS
QILPDPSKPSKRSFIEDLLFNKVTLADAGFIKQYGDCLGDIAARDLICAQKFNGLTVLPPLLTDEMIAQYTSALLAGTITCG
WTFGAGACLQIPFAMQMAYRFNGIGVTQNVLYENQKLIANQFNSAIGKIQDSLSSTASALGKLQDVVNQNAQALNTL
VKQLSSNFGAISSVLNDILSRLDKVEAEVQIDRLITGRLQSLQTYVTQQLIRAAEIRASANLAATKMSECVLGQSKRVDFC
GKGYHLMSFPQSAPHGVVFLHVTYVPAQEKNFTTAPAICHDGKAHFPREGVFVSNGTHWFVTQRNFYEPQIITTDNTF
VSGNCDVVIGIVNNTVYDPLQPELDSFKEELDKYFKNHTSPDVDLGDISGINASVVNIQKEIDRLNEVAKNLNESLIDLQE
LGKYEQGSGYIPEAPRDGQAYVRKDGEWVLLSTFLGRSLEVLFQGPGSLPETGGGSDYKDDDDKGGGGSGGGGSGGG
GSGGGGSGGGGSHHHHHH
SEQ ID NO 65: SEQ ID NO 2 + D614N + N532P + G880C + F888C
MFVFLVLLPLVSSQCVNLTTRTQLPPAYTNSFTRGVYYPDKVFRSSVLHSTQDLFLPFFSNVTWFHAIHVSGTNGTKRFD
NPVLPFNDGVYFASTEKSNIIRGWIFGTTLDSKTQSLLIVNNATNVVIKVCEFQFCNDPFLGVYYHKNNKSWMESEFRVY
SSANNCTFEYVSQPFLMDLEGKQGNFKNLREFVFKNIDGYFKIYSKHTPINLVRDLPQGFSALEPLVDLPIGINITRFQTLL
ALHRSYLTPGDSSSGWTAGAAAYYVGYLQPRTFLLKYNENGTITDAVDCALDPLSETKCTLKSFTVEKGIYQTSNFRVQP
TESIVRFPNITNLCPFGEVFNATRFASVYAWNRKRISNCVADYSVLYNSASFSTFKCYGVSPTKLNDLCFTNVYADSFVIR
GDEVRQIAPGQTGKIADYNYKLPDDFTGCVIAWNSNNLDSKVGGNYNYLYRLFRKSNLKPFERDISTEIYQAGSTPCNG
VEGFNCYFPLQSYGFQPTNGVGYQPYRVVVLSFELLHAPATVCGPKKSTPLVKNKCVNFNFNGLTGTGVLTESNKKFLP
FQQFGRDIADTTDAVRDPQTLEILDITPCSFGGVSVITPGTNTSNQVAVLYQNVNCTEVPVAIHADQLTPTWRVYSTGS
NVFQTRAGCLIGAEHVNNSYECDIPIGAGICASYQTQTNSPSRAGSVASQSIIAYTMSLGAENSVAYSNNSIAIPTNFTISV
TTEILPVSMTKTSVDCTMYICGDSTECSNLLLQYGSFCTQLNRALTGIAVEQDKNTQEVFAQVKQIYKTPPIKDFGGFNFS
QILPDPSKPSKRSFIEDLLFNKVTLADAGFIKQYGDCLGDIAARDLICAQKFNGLTVLPPLLTDEMIAQYTSALLACTITSG
WTCGAGAALQIPFAMQMAYRFNGIGVTQNVLYENQKLIANQFNSAIGKIQDSLSSTASALGKLQDVVNQNAQALNTL
VKQLSSNFGAISSVLNDILSRLDKVEAEVQIDRLITGRLQSLQTYVTQQLIRAAEIRASANLAATKMSECVLGQSKRVDFC
GKGYHLMSFPQSAPHGVVFLHVTYVPAQEKNFTTAPAICHDGKAHFPREGVFVSNGTHWFVTQRNFYEPQIITTDNTF
VSGNCDVVIGIVNNTVYDPLQPELDSFKEELDKYFKNHTSPDVDLGDISGINASVVNIQKEIDRLNEVAKNLNESLIDLQE
LGKYEQGSGYIPEAPRDGQAYVRKDGEWVLLSTFLGRSLEVLFQGPGSLPETGGGSDYKDDDDKGGGGSGGGGSGGG
GSGGGGSGGGGSHHHHHH
SEQ ID NO 66: SEQ ID NO 2 + D614N + N532P + S884C + A893C
MFVFLVLLPLVSSQCVNLTTRTQLPPAYTNSFTRGVYYPDKVFRSSVLHSTQDLFLPFFSNVTWFHAIHVSGTNGTKRFD
NPVLPFNDGVYFASTEKSNIIRGWIFGTTLDSKTQSLLIVNNATNVVIKVCEFQFCNDPFLGVYYHKNNKSWMESEFRVY
SSANNCTFEYVSQPFLMDLEGKQGNFKNLREFVFKNIDGYFKIYSKHTPINLVRDLPQGFSALEPLVDLPIGINITRFQTLL
ALHRSYLTPGDSSSGWTAGAAAYYVGYLQPRTFLLKYNENGTITDAVDCALDPLSETKCTLKSFTVEKGIYQTSNFRVQP
TESIVRFPNITNLCPFGEVFNATRFASVYAWNRKRISNCVADYSVLYNSASFSTFKCYGVSPTKLNDLCFTNVYADSFVIR
GDEVRQIAPGQTGKIADYNYKLPDDFTGCVIAWNSNNLDSKVGGNYNYLYRLFRKSNLKPFERDISTEIYQAGSTPCNG
VEGFNCYFPLQSYGFQPTNGVGYQPYRVVVLSFELLHAPATVCGPKKSTPLVKNKCVNFNFNGLTGTGVLTESNKKFLP
FQQFGRDIADTTDAVRDPQTLEILDITPCSFGGVSVITPGTNTSNQVAVLYQNVNCTEVPVAIHADQLTPTWRVYSTGS
NVFQTRAGCLIGAEHVNNSYECDIPIGAGICASYQTQTNSPSRAGSVASQSIIAYTMSLGAENSVAYSNNSIAIPTNFTISV
TTEILPVSMTKTSVDCTMYICGDSTECSNLLLQYGSFCTQLNRALTGIAVEQDKNTQEVFAQVKQIYKTPPIKDFGGFNFS
QILPDPSKPSKRSFIEDLLFNKVTLADAGFIKQYGDCLGDIAARDLICAQKFNGLTVLPPLLTDEMIAQYTSALLAGTITCG
WTFGAGACLQIPFAMQMAYRFNGIGVTQNVLYENQKLIANQFNSAIGKIQDSLSSTASALGKLQDVVNQNAQALNTL
VKQLSSNFGAISSVLNDILSRLDKVEAEVQIDRLITGRLQSLQTYVTQQLIRAAEIRASANLAATKMSECVLGQSKRVDFC
GKGYHLMSFPQSAPHGVVFLHVTYVPAQEKNFTTAPAICHDGKAHFPREGVFVSNGTHWFVTQRNFYEPQIITTDNTF
VSGNCDVVIGIVNNTVYDPLQPELDSFKEELDKYFKNHTSPDVDLGDISGINASVVNIQKEIDRLNEVAKNLNESLIDLQE
LGKYEQGSGYIPEAPRDGQAYVRKDGEWVLLSTFLGRSLEVLFQGPGSLPETGGGSDYKDDDDKGGGGSGGGGSGGG
GSGGGGSGGGGSHHHHHH
SEQ ID NO 67: SEQ ID NO 2 + T572I + N532P + G880C + F888C
MFVFLVLLPLVSSQCVNLTTRTQLPPAYTNSFTRGVYYPDKVFRSSVLHSTQDLFLPFFSNVTWFHAIHVSGTNGTKRFD
NPVLPFNDGVYFASTEKSNIIRGWIFGTTLDSKTQSLLIVNNATNVVIKVCEFQFCNDPFLGVYYHKNNKSWMESEFRVY
SSANNCTFEYVSQPFLMDLEGKQGNFKNLREFVFKNIDGYFKIYSKHTPINLVRDLPQGFSALEPLVDLPIGINITRFQTLL
ALHRSYLTPGDSSSGWTAGAAAYYVGYLQPRTFLLKYNENGTITDAVDCALDPLSETKCTLKSFTVEKGIYQTSNFRVQP
TESIVRFPNITNLCPFGEVFNATRFASVYAWNRKRISNCVADYSVLYNSASFSTFKCYGVSPTKLNDLCFTNVYADSFVIR
GDEVRQIAPGQTGKIADYNYKLPDDFTGCVIAWNSNNLDSKVGGNYNYLYRLFRKSNLKPFERDISTEIYQAGSTPCNG
VEGFNCYFPLQSYGFQPTNGVGYQPYRVVVLSFELLHAPATVCGPKKSTPLVKNKCVNFNFNGLTGTGVLTESNKKFLP
FQQFGRDIADITDAVRDPQTLEILDITPCSFGGVSVITPGTNTSNQVAVLYQDVNCTEVPVAIHADQLTPTWRVYSTGS
NVFQTRAGCLIGAEHVNNSYECDIPIGAGICASYQTQTNSPSRAGSVASQSIIAYTMSLGAENSVAYSNNSIAIPTNFTISV
TTEILPVSMTKTSVDCTMYICGDSTECSNLLLQYGSFCTQLNRALTGIAVEQDKNTQEVFAQVKQIYKTPPIKDFGGFNFS
QILPDPSKPSKRSFIEDLLFNKVTLADAGFIKQYGDCLGDIAARDLICAQKFNGLTVLPPLLTDEMIAQYTSALLACTITSG
WTCGAGAALQIPFAMQMAYRFNGIGVTQNVLYENQKLIANQFNSAIGKIQDSLSSTASALGKLQDVVNQNAQALNTL
VKQLSSNFGAISSVLNDILSRLDKVEAEVQIDRLITGRLQSLQTYVTQQLIRAAEIRASANLAATKMSECVLGQSKRVDFC
GKGYHLMSFPQSAPHGVVFLHVTYVPAQEKNFTTAPAICHDGKAHFPREGVFVSNGTHWFVTQRNFYEPQIITTDNTF
VSGNCDVVIGIVNNTVYDPLQPELDSFKEELDKYFKNHTSPDVDLGDISGINASVVNIQKEIDRLNEVAKNLNESLIDLQE
LGKYEQGSGYIPEAPRDGQAYVRKDGEWVLLSTFLGRSLEVLFQGPGSLPETGGGSDYKDDDDKGGGGSGGGGSGGG
GSGGGGSGGGGSHHHHHH
SEQ ID NO 68: SEQ ID NO 2 + T572I + N532P + S884C + A893C
MFVFLVLLPLVSSQCVNLTTRTQLPPAYTNSFTRGVYYPDKVFRSSVLHSTQDLFLPFFSNVTWFHAIHVSGTNGTKRFD
NPVLPFNDGVYFASTEKSNIIRGWIFGTTLDSKTQSLLIVNNATNVVIKVCEFQFCNDPFLGVYYHKNNKSWMESEFRVY
SSANNCTFEYVSQPFLMDLEGKQGNFKNLREFVFKNIDGYFKIYSKHTPINLVRDLPQGFSALEPLVDLPIGINITRFQTLL
ALHRSYLTPGDSSSGWTAGAAAYYVGYLQPRTFLLKYNENGTITDAVDCALDPLSETKCTLKSFTVEKGIYQTSNFRVQP
TESIVRFPNITNLCPFGEVFNATRFASVYAWNRKRISNCVADYSVLYNSASFSTFKCYGVSPTKLNDLCFTNVYADSFVIR
GDEVRQIAPGQTGKIADYNYKLPDDFTGCVIAWNSNNLDSKVGGNYNYLYRLFRKSNLKPFERDISTEIYQAGSTPCNG
VEGFNCYFPLQSYGFQPTNGVGYQPYRVVVLSFELLHAPATVCGPKKSTPLVKNKCVNFNFNGLTGTGVLTESNKKFLP
FQQFGRDIADITDAVRDPQTLEILDITPCSFGGVSVITPGTNTSNQVAVLYQDVNCTEVPVAIHADQLTPTWRVYSTGS
NVFQTRAGCLIGAEHVNNSYECDIPIGAGICASYQTQTNSPSRAGSVASQSIIAYTMSLGAENSVAYSNNSIAIPTNFTISV
TTEILPVSMTKTSVDCTMYICGDSTECSNLLLQYGSFCTQLNRALTGIAVEQDKNTQEVFAQVKQIYKTPPIKDFGGFNFS
QILPDPSKPSKRSFIEDLLFNKVTLADAGFIKQYGDCLGDIAARDLICAQKFNGLTVLPPLLTDEMIAQYTSALLAGTITCG
WTFGAGACLQIPFAMQMAYRFNGIGVTQNVLYENQKLIANQFNSAIGKIQDSLSSTASALGKLQDVVNQNAQALNTL
VKQLSSNFGAISSVLNDILSRLDKVEAEVQIDRLITGRLQSLQTYVTQQLIRAAEIRASANLAATKMSECVLGQSKRVDFC
GKGYHLMSFPQSAPHGVVFLHVTYVPAQEKNFTTAPAICHDGKAHFPREGVFVSNGTHWFVTQRNFYEPQIITTDNTF
VSGNCDVVIGIVNNTVYDPLQPELDSFKEELDKYFKNHTSPDVDLGDISGINASVVNIQKEIDRLNEVAKNLNESLIDLQE
LGKYEQGSGYIPEAPRDGQAYVRKDGEWVLLSTFLGRSLEVLFQGPGSLPETGGGSDYKDDDDKGGGGSGGGGSGGG
GSGGGGSGGGGSHHHHHH
SEQ ID NO 69: SEQ ID NO 2 + A942P + A892P + D614N + T572I
MFVFLVLLPLVSSQCVNLTTRTQLPPAYTNSFTRGVYYPDKVFRSSVLHSTQDLFLPFFSNVTWFHAIHVSGTNGTKRFD
NPVLPFNDGVYFASTEKSNIIRGWIFGTTLDSKTQSLLIVNNATNVVIKVCEFQFCNDPFLGVYYHKNNKSWMESEFRVY
SSANNCTFEYVSQPFLMDLEGKQGNFKNLREFVFKNIDGYFKIYSKHTPINLVRDLPQGFSALEPLVDLPIGINITRFQTLL
ALHRSYLTPGDSSSGWTAGAAAYYVGYLQPRTFLLKYNENGTITDAVDCALDPLSETKCTLKSFTVEKGIYQTSNFRVQP
TESIVRFPNITNLCPFGEVFNATRFASVYAWNRKRISNCVADYSVLYNSASFSTFKCYGVSPTKLNDLCFTNVYADSFVIR
GDEVRQIAPGQTGKIADYNYKLPDDFTGCVIAWNSNNLDSKVGGNYNYLYRLFRKSNLKPFERDISTEIYQAGSTPCNG
VEGFNCYFPLQSYGFQPTNGVGYQPYRVVVLSFELLHAPATVCGPKKSTNLVKNKCVNFNFNGLTGTGVLTESNKKFLP
FQQFGRDIADITDAVRDPQTLEILDITPCSFGGVSVITPGTNTSNQVAVLYQNVNCTEVPVAIHADQLTPTWRVYSTGS
NVFQTRAGCLIGAEHVNNSYECDIPIGAGICASYQTQTNSPSRAGSVASQSIIAYTMSLGAENSVAYSNNSIAIPTNFTISV
TTEILPVSMTKTSVDCTMYICGDSTECSNLLLQYGSFCTQLNRALTGIAVEQDKNTQEVFAQVKQIYKTPPIKDFGGFNFS
QILPDPSKPSKRSFIEDLLFNKVTLADAGFIKQYGDCLGDIAARDLICAQKFNGLTVLPPLLTDEMIAQYTSALLAGTITSG
WTFGAGPALQIPFAMQMAYRFNGIGVTQNVLYENQKLIANQFNSAIGKIQDSLSSTPSALGKLQDVVNQNAQALNTL
VKQLSSNFGAISSVLNDILSRLDKVEAEVQIDRLITGRLQSLQTYVTQQLIRAAEIRASANLAATKMSECVLGQSKRVDFC
GKGYHLMSFPQSAPHGVVFLHVTYVPAQEKNFTTAPAICHDGKAHFPREGVFVSNGTHWFVTQRNFYEPQIITTDNTF
VSGNCDVVIGIVNNTVYDPLQPELDSFKEELDKYFKNHTSPDVDLGDISGINASVVNIQKEIDRLNEVAKNLNESLIDLQE
LGKYEQGSGYIPEAPRDGQAYVRKDGEWVLLSTFLGRSLEVLFQGPGSLPETGGGSDYKDDDDKGGGGSGGGGSGGG
GSGGGGSGGGGSHHHHHH
SEQ ID NO 70: SEQ ID NO 2 + A942P + A892P + D614N + N532P
MFVFLVLLPLVSSQCVNLTTRTQLPPAYTNSFTRGVYYPDKVFRSSVLHSTQDLFLPFFSNVTWFHAIHVSGTNGTKRFD
NPVLPFNDGVYFASTEKSNIIRGWIFGTTLDSKTQSLLIVNNATNVVIKVCEFQFCNDPFLGVYYHKNNKSWMESEFRVY
SSANNCTFEYVSQPFLMDLEGKQGNFKNLREFVFKNIDGYFKIYSKHTPINLVRDLPQGFSALEPLVDLPIGINITRFQTLL
ALHRSYLTPGDSSSGWTAGAAAYYVGYLQPRTFLLKYNENGTITDAVDCALDPLSETKCTLKSFTVEKGIYQTSNFRVQP
TESIVRFPNITNLCPFGEVFNATRFASVYAWNRKRISNCVADYSVLYNSASFSTFKCYGVSPTKLNDLCFTNVYADSFVIR
GDEVRQIAPGQTGKIADYNYKLPDDFTGCVIAWNSNNLDSKVGGNYNYLYRLFRKSNLKPFERDISTEIYQAGSTPCNG
VEGFNCYFPLQSYGFQPTNGVGYQPYRVVVLSFELLHAPATVCGPKKSTPLVKNKCVNFNFNGLTGTGVLTESNKKFLP
FQQFGRDIADTTDAVRDPQTLEILDITPCSFGGVSVITPGTNTSNQVAVLYQNVNCTEVPVAIHADQLTPTWRVYSTGS
NVFQTRAGCLIGAEHVNNSYECDIPIGAGICASYQTQTNSPSRAGSVASQSIIAYTMSLGAENSVAYSNNSIAIPTNFTISV
TTEILPVSMTKTSVDCTMYICGDSTECSNLLLQYGSFCTQLNRALTGIAVEQDKNTQEVFAQVKQIYKTPPIKDFGGFNFS
QILPDPSKPSKRSFIEDLLFNKVTLADAGFIKQYGDCLGDIAARDLICAQKFNGLTVLPPLLTDEMIAQYTSALLAGTITSG
WTFGAGPALQIPFAMQMAYRFNGIGVTQNVLYENQKLIANQFNSAIGKIQDSLSSTPSALGKLQDVVNQNAQALNTL
VKQLSSNFGAISSVLNDILSRLDKVEAEVQIDRLITGRLQSLQTYVTQQLIRAAEIRASANLAATKMSECVLGQSKRVDFC
GKGYHLMSFPQSAPHGVVFLHVTYVPAQEKNFTTAPAICHDGKAHFPREGVFVSNGTHWFVTQRNFYEPQIITTDNTF
VSGNCDVVIGIVNNTVYDPLQPELDSFKEELDKYFKNHTSPDVDLGDISGINASVVNIQKEIDRLNEVAKNLNESLIDLQE
LGKYEQGSGYIPEAPRDGQAYVRKDGEWVLLSTFLGRSLEVLFQGPGSLPETGGGSDYKDDDDKGGGGSGGGGSGGG
GSGGGGSGGGGSHHHHHH
SEQ ID NO 71: SEQ ID NO 2 + A942P + A892P + D614N + G880C + F888C
MFVFLVLLPLVSSQCVNLTTRTQLPPAYTNSFTRGVYYPDKVFRSSVLHSTQDLFLPFFSNVTWFHAIHVSGTNGTKRFD
NPVLPFNDGVYFASTEKSNIIRGWIFGTTLDSKTQSLLIVNNATNVVIKVCEFQFCNDPFLGVYYHKNNKSWMESEFRVY
SSANNCTFEYVSQPFLMDLEGKQGNFKNLREFVFKNIDGYFKIYSKHTPINLVRDLPQGFSALEPLVDLPIGINITRFQTLL
ALHRSYLTPGDSSSGWTAGAAAYYVGYLQPRTFLLKYNENGTITDAVDCALDPLSETKCTLKSFTVEKGIYQTSNFRVQP
TESIVRFPNITNLCPFGEVFNATRFASVYAWNRKRISNCVADYSVLYNSASFSTFKCYGVSPTKLNDLCFTNVYADSFVIR
GDEVRQIAPGQTGKIADYNYKLPDDFTGCVIAWNSNNLDSKVGGNYNYLYRLFRKSNLKPFERDISTEIYQAGSTPCNG
VEGFNCYFPLQSYGFQPTNGVGYQPYRVVVLSFELLHAPATVCGPKKSTNLVKNKCVNFNFNGLTGTGVLTESNKKFLP
FQQFGRDIADTTDAVRDPQTLEILDITPCSFGGVSVITPGTNTSNQVAVLYQNVNCTEVPVAIHADQLTPTWRVYSTGS
NVFQTRAGCLIGAEHVNNSYECDIPIGAGICASYQTQTNSPSRAGSVASQSIIAYTMSLGAENSVAYSNNSIAIPTNFTISV
TTEILPVSMTKTSVDCTMYICGDSTECSNLLLQYGSFCTQLNRALTGIAVEQDKNTQEVFAQVKQIYKTPPIKDFGGFNFS
QILPDPSKPSKRSFIEDLLFNKVTLADAGFIKQYGDCLGDIAARDLICAQKFNGLTVLPPLLTDEMIAQYTSALLACTITSG
WTCGAGPALQIPFAMQMAYRFNGIGVTQNVLYENQKLIANQFNSAIGKIQDSLSSTPSALGKLQDVVNQNAQALNTL
VKQLSSNFGAISSVLNDILSRLDKVEAEVQIDRLITGRLQSLQTYVTQQLIRAAEIRASANLAATKMSECVLGQSKRVDFC
GKGYHLMSFPQSAPHGVVFLHVTYVPAQEKNFTTAPAICHDGKAHFPREGVFVSNGTHWFVTQRNFYEPQIITTDNTF
VSGNCDVVIGIVNNTVYDPLQPELDSFKEELDKYFKNHTSPDVDLGDISGINASVVNIQKEIDRLNEVAKNLNESLIDLQE
LGKYEQGSGYIPEAPRDGQAYVRKDGEWVLLSTFLGRSLEVLFQGPGSLPETGGGSDYKDDDDKGGGGSGGGGSGGG
GSGGGGSGGGGSHHHHHH
SEQ ID NO 72: SEQ ID NO 2 + A942P + A892P + D614N + S884C + A893C
MFVFLVLLPLVSSQCVNLTTRTQLPPAYTNSFTRGVYYPDKVFRSSVLHSTQDLFLPFFSNVTWFHAIHVSGTNGTKRFD
NPVLPFNDGVYFASTEKSNIIRGWIFGTTLDSKTQSLLIVNNATNVVIKVCEFQFCNDPFLGVYYHKNNKSWMESEFRVY
SSANNCTFEYVSQPFLMDLEGKQGNFKNLREFVFKNIDGYFKIYSKHTPINLVRDLPQGFSALEPLVDLPIGINITRFQTLL
ALHRSYLTPGDSSSGWTAGAAAYYVGYLQPRTFLLKYNENGTITDAVDCALDPLSETKCTLKSFTVEKGIYQTSNFRVQP
TESIVRFPNITNLCPFGEVFNATRFASVYAWNRKRISNCVADYSVLYNSASFSTFKCYGVSPTKLNDLCFTNVYADSFVIR
GDEVRQIAPGQTGKIADYNYKLPDDFTGCVIAWNSNNLDSKVGGNYNYLYRLFRKSNLKPFERDISTEIYQAGSTPCNG
VEGFNCYFPLQSYGFQPTNGVGYQPYRVVVLSFELLHAPATVCGPKKSTNLVKNKCVNFNFNGLTGTGVLTESNKKFLP
FQQFGRDIADTTDAVRDPQTLEILDITPCSFGGVSVITPGTNTSNQVAVLYQNVNCTEVPVAIHADQLTPTWRVYSTGS
NVFQTRAGCLIGAEHVNNSYECDIPIGAGICASYQTQTNSPSRAGSVASQSIIAYTMSLGAENSVAYSNNSIAIPTNFTISV
TTEILPVSMTKTSVDCTMYICGDSTECSNLLLQYGSFCTQLNRALTGIAVEQDKNTQEVFAQVKQIYKTPPIKDFGGFNFS
QILPDPSKPSKRSFIEDLLFNKVTLADAGFIKQYGDCLGDIAARDLICAQKFNGLTVLPPLLTDEMIAQYTSALLAGTITCG
WTFGAGPCLQIPFAMQMAYRFNGIGVTQNVLYENQKLIANQFNSAIGKIQDSLSSTPSALGKLQDVVNQNAQALNTL
VKQLSSNFGAISSVLNDILSRLDKVEAEVQIDRLITGRLQSLQTYVTQQLIRAAEIRASANLAATKMSECVLGQSKRVDFC
GKGYHLMSFPQSAPHGVVFLHVTYVPAQEKNFTTAPAICHDGKAHFPREGVFVSNGTHWFVTQRNFYEPQIITTDNTF
VSGNCDVVIGIVNNTVYDPLQPELDSFKEELDKYFKNHTSPDVDLGDISGINASVVNIQKEIDRLNEVAKNLNESLIDLQE
LGKYEQGSGYIPEAPRDGQAYVRKDGEWVLLSTFLGRSLEVLFQGPGSLPETGGGSDYKDDDDKGGGGSGGGGSGGG
GSGGGGSGGGGSHHHHHH
SEQ ID NO 73: SEQ ID NO 2 + A942P + A892P + T572I + N532P
MFVFLVLLPLVSSQCVNLTTRTQLPPAYTNSFTRGVYYPDKVFRSSVLHSTQDLFLPFFSNVTWFHAIHVSGTNGTKRFD
NPVLPFNDGVYFASTEKSNIIRGWIFGTTLDSKTQSLLIVNNATNVVIKVCEFQFCNDPFLGVYYHKNNKSWMESEFRVY
SSANNCTFEYVSQPFLMDLEGKQGNFKNLREFVFKNIDGYFKIYSKHTPINLVRDLPQGFSALEPLVDLPIGINITRFQTLL
ALHRSYLTPGDSSSGWTAGAAAYYVGYLQPRTFLLKYNENGTITDAVDCALDPLSETKCTLKSFTVEKGIYQTSNFRVQP
TESIVRFPNITNLCPFGEVFNATRFASVYAWNRKRISNCVADYSVLYNSASFSTFKCYGVSPTKLNDLCFTNVYADSFVIR
GDEVRQIAPGQTGKIADYNYKLPDDFTGCVIAWNSNNLDSKVGGNYNYLYRLFRKSNLKPFERDISTEIYQAGSTPCNG
VEGFNCYFPLQSYGFQPTNGVGYQPYRVVVLSFELLHAPATVCGPKKSTPLVKNKCVNFNFNGLTGTGVLTESNKKFLP
FQQFGRDIADITDAVRDPQTLEILDITPCSFGGVSVITPGTNTSNQVAVLYQDVNCTEVPVAIHADQLTPTWRVYSTGS
NVFQTRAGCLIGAEHVNNSYECDIPIGAGICASYQTQTNSPSRAGSVASQSIIAYTMSLGAENSVAYSNNSIAIPTNFTISV
TTEILPVSMTKTSVDCTMYICGDSTECSNLLLQYGSFCTQLNRALTGIAVEQDKNTQEVFAQVKQIYKTPPIKDFGGFNFS
QILPDPSKPSKRSFIEDLLFNKVTLADAGFIKQYGDCLGDIAARDLICAQKFNGLTVLPPLLTDEMIAQYTSALLAGTITSG
WTFGAGPALQIPFAMQMAYRFNGIGVTQNVLYENQKLIANQFNSAIGKIQDSLSSTPSALGKLQDVVNQNAQALNTL
VKQLSSNFGAISSVLNDILSRLDKVEAEVQIDRLITGRLQSLQTYVTQQLIRAAEIRASANLAATKMSECVLGQSKRVDFC
GKGYHLMSFPQSAPHGVVFLHVTYVPAQEKNFTTAPAICHDGKAHFPREGVFVSNGTHWFVTQRNFYEPQIITTDNTF
VSGNCDVVIGIVNNTVYDPLQPELDSFKEELDKYFKNHTSPDVDLGDISGINASVVNIQKEIDRLNEVAKNLNESLIDLQE
LGKYEQGSGYIPEAPRDGQAYVRKDGEWVLLSTFLGRSLEVLFQGPGSLPETGGGSDYKDDDDKGGGGSGGGGSGGG
GSGGGGSGGGGSHHHHHH
SEQ ID NO 74: SEQ ID NO 2 + A942P + A892P + T572I + G880C + F888C
MFVFLVLLPLVSSQCVNLTTRTQLPPAYTNSFTRGVYYPDKVFRSSVLHSTQDLFLPFFSNVTWFHAIHVSGTNGTKRFD
NPVLPFNDGVYFASTEKSNIIRGWIFGTTLDSKTQSLLIVNNATNVVIKVCEFQFCNDPFLGVYYHKNNKSWMESEFRVY
SSANNCTFEYVSQPFLMDLEGKQGNFKNLREFVFKNIDGYFKIYSKHTPINLVRDLPQGFSALEPLVDLPIGINITRFQTLL
ALHRSYLTPGDSSSGWTAGAAAYYVGYLQPRTFLLKYNENGTITDAVDCALDPLSETKCTLKSFTVEKGIYQTSNFRVQP
TESIVRFPNITNLCPFGEVFNATRFASVYAWNRKRISNCVADYSVLYNSASFSTFKCYGVSPTKLNDLCFTNVYADSFVIR
GDEVRQIAPGQTGKIADYNYKLPDDFTGCVIAWNSNNLDSKVGGNYNYLYRLFRKSNLKPFERDISTEIYQAGSTPCNG
VEGFNCYFPLQSYGFQPTNGVGYQPYRVVVLSFELLHAPATVCGPKKSTNLVKNKCVNFNFNGLTGTGVLTESNKKFLP
FQQFGRDIADITDAVRDPQTLEILDITPCSFGGVSVITPGTNTSNQVAVLYQDVNCTEVPVAIHADQLTPTWRVYSTGS
NVFQTRAGCLIGAEHVNNSYECDIPIGAGICASYQTQTNSPSRAGSVASQSIIAYTMSLGAENSVAYSNNSIAIPTNFTISV
TTEILPVSMTKTSVDCTMYICGDSTECSNLLLQYGSFCTQLNRALTGIAVEQDKNTQEVFAQVKQIYKTPPIKDFGGFNFS
QILPDPSKPSKRSFIEDLLFNKVTLADAGFIKQYGDCLGDIAARDLICAQKFNGLTVLPPLLTDEMIAQYTSALLACTITSG
WTCGAGPALQIPFAMQMAYRFNGIGVTQNVLYENQKLIANQFNSAIGKIQDSLSSTPSALGKLQDVVNQNAQALNTL
VKQLSSNFGAISSVLNDILSRLDKVEAEVQIDRLITGRLQSLQTYVTQQLIRAAEIRASANLAATKMSECVLGQSKRVDFC
GKGYHLMSFPQSAPHGVVFLHVTYVPAQEKNFTTAPAICHDGKAHFPREGVFVSNGTHWFVTQRNFYEPQIITTDNTF
VSGNCDVVIGIVNNTVYDPLQPELDSFKEELDKYFKNHTSPDVDLGDISGINASVVNIQKEIDRLNEVAKNLNESLIDLQE
LGKYEQGSGYIPEAPRDGQAYVRKDGEWVLLSTFLGRSLEVLFQGPGSLPETGGGSDYKDDDDKGGGGSGGGGSGGG
GSGGGGSGGGGSHHHHHH
SEQ ID NO 75: SEQ ID NO 2 + A942P + A892P + T572I + S884C + A893C
MFVFLVLLPLVSSQCVNLTTRTQLPPAYTNSFTRGVYYPDKVFRSSVLHSTQDLFLPFFSNVTWFHAIHVSGTNGTKRFD
NPVLPFNDGVYFASTEKSNIIRGWIFGTTLDSKTQSLLIVNNATNVVIKVCEFQFCNDPFLGVYYHKNNKSWMESEFRVY
SSANNCTFEYVSQPFLMDLEGKQGNFKNLREFVFKNIDGYFKIYSKHTPINLVRDLPQGFSALEPLVDLPIGINITRFQTLL
ALHRSYLTPGDSSSGWTAGAAAYYVGYLQPRTFLLKYNENGTITDAVDCALDPLSETKCTLKSFTVEKGIYQTSNFRVQP
TESIVRFPNITNLCPFGEVFNATRFASVYAWNRKRISNCVADYSVLYNSASFSTFKCYGVSPTKLNDLCFTNVYADSFVIR
GDEVRQIAPGQTGKIADYNYKLPDDFTGCVIAWNSNNLDSKVGGNYNYLYRLFRKSNLKPFERDISTEIYQAGSTPCNG
VEGFNCYFPLQSYGFQPTNGVGYQPYRVVVLSFELLHAPATVCGPKKSTNLVKNKCVNFNFNGLTGTGVLTESNKKFLP
FQQFGRDIADITDAVRDPQTLEILDITPCSFGGVSVITPGTNTSNQVAVLYQDVNCTEVPVAIHADQLTPTWRVYSTGS
NVFQTRAGCLIGAEHVNNSYECDIPIGAGICASYQTQTNSPSRAGSVASQSIIAYTMSLGAENSVAYSNNSIAIPTNFTISV
TTEILPVSMTKTSVDCTMYICGDSTECSNLLLQYGSFCTQLNRALTGIAVEQDKNTQEVFAQVKQIYKTPPIKDFGGFNFS
QILPDPSKPSKRSFIEDLLFNKVTLADAGFIKQYGDCLGDIAARDLICAQKFNGLTVLPPLLTDEMIAQYTSALLAGTITCG
WTFGAGPCLQIPFAMQMAYRFNGIGVTQNVLYENQKLIANQFNSAIGKIQDSLSSTPSALGKLQDVVNQNAQALNTL
VKQLSSNFGAISSVLNDILSRLDKVEAEVQIDRLITGRLQSLQTYVTQQLIRAAEIRASANLAATKMSECVLGQSKRVDFC
GKGYHLMSFPQSAPHGVVFLHVTYVPAQEKNFTTAPAICHDGKAHFPREGVFVSNGTHWFVTQRNFYEPQIITTDNTF
VSGNCDVVIGIVNNTVYDPLQPELDSFKEELDKYFKNHTSPDVDLGDISGINASVVNIQKEIDRLNEVAKNLNESLIDLQE
LGKYEQGSGYIPEAPRDGQAYVRKDGEWVLLSTFLGRSLEVLFQGPGSLPETGGGSDYKDDDDKGGGGSGGGGSGGG
GSGGGGSGGGGSHHHHHH
SEQ ID NO 76: SEQ ID NO 2 + A942P + A892P + N532P + G880C + F888C
MFVFLVLLPLVSSQCVNLTTRTQLPPAYTNSFTRGVYYPDKVFRSSVLHSTQDLFLPFFSNVTWFHAIHVSGTNGTKRFD
NPVLPFNDGVYFASTEKSNIIRGWIFGTTLDSKTQSLLIVNNATNVVIKVCEFQFCNDPFLGVYYHKNNKSWMESEFRVY
SSANNCTFEYVSQPFLMDLEGKQGNFKNLREFVFKNIDGYFKIYSKHTPINLVRDLPQGFSALEPLVDLPIGINITRFQTLL
ALHRSYLTPGDSSSGWTAGAAAYYVGYLQPRTFLLKYNENGTITDAVDCALDPLSETKCTLKSFTVEKGIYQTSNFRVQP
TESIVRFPNITNLCPFGEVFNATRFASVYAWNRKRISNCVADYSVLYNSASFSTFKCYGVSPTKLNDLCFTNVYADSFVIR
GDEVRQIAPGQTGKIADYNYKLPDDFTGCVIAWNSNNLDSKVGGNYNYLYRLFRKSNLKPFERDISTEIYQAGSTPCNG
VEGFNCYFPLQSYGFQPTNGVGYQPYRVVVLSFELLHAPATVCGPKKSTPLVKNKCVNFNFNGLTGTGVLTESNKKFLP
FQQFGRDIADTTDAVRDPQTLEILDITPCSFGGVSVITPGTNTSNQVAVLYQDVNCTEVPVAIHADQLTPTWRVYSTGS
NVFQTRAGCLIGAEHVNNSYECDIPIGAGICASYQTQTNSPSRAGSVASQSIIAYTMSLGAENSVAYSNNSIAIPTNFTISV
TTEILPVSMTKTSVDCTMYICGDSTECSNLLLQYGSFCTQLNRALTGIAVEQDKNTQEVFAQVKQIYKTPPIKDFGGFNFS
QILPDPSKPSKRSFIEDLLFNKVTLADAGFIKQYGDCLGDIAARDLICAQKFNGLTVLPPLLTDEMIAQYTSALLACTITSG
WTCGAGPALQIPFAMQMAYRFNGIGVTQNVLYENQKLIANQFNSAIGKIQDSLSSTPSALGKLQDVVNQNAQALNTL
VKQLSSNFGAISSVLNDILSRLDKVEAEVQIDRLITGRLQSLQTYVTQQLIRAAEIRASANLAATKMSECVLGQSKRVDFC
GKGYHLMSFPQSAPHGVVFLHVTYVPAQEKNFTTAPAICHDGKAHFPREGVFVSNGTHWFVTQRNFYEPQIITTDNTF
VSGNCDVVIGIVNNTVYDPLQPELDSFKEELDKYFKNHTSPDVDLGDISGINASVVNIQKEIDRLNEVAKNLNESLIDLQE
LGKYEQGSGYIPEAPRDGQAYVRKDGEWVLLSTFLGRSLEVLFQGPGSLPETGGGSDYKDDDDKGGGGSGGGGSGGG
GSGGGGSGGGGSHHHHHH
SEQ ID NO 77: SEQ ID NO 2 + A942P + A892P + N532P + S884C + A893C
MFVFLVLLPLVSSQCVNLTTRTQLPPAYTNSFTRGVYYPDKVFRSSVLHSTQDLFLPFFSNVTWFHAIHVSGTNGTKRFD
NPVLPFNDGVYFASTEKSNIIRGWIFGTTLDSKTQSLLIVNNATNVVIKVCEFQFCNDPFLGVYYHKNNKSWMESEFRVY
SSANNCTFEYVSQPFLMDLEGKQGNFKNLREFVFKNIDGYFKIYSKHTPINLVRDLPQGFSALEPLVDLPIGINITRFQTLL
ALHRSYLTPGDSSSGWTAGAAAYYVGYLQPRTFLLKYNENGTITDAVDCALDPLSETKCTLKSFTVEKGIYQTSNFRVQP
TESIVRFPNITNLCPFGEVFNATRFASVYAWNRKRISNCVADYSVLYNSASFSTFKCYGVSPTKLNDLCFTNVYADSFVIR
GDEVRQIAPGQTGKIADYNYKLPDDFTGCVIAWNSNNLDSKVGGNYNYLYRLFRKSNLKPFERDISTEIYQAGSTPCNG
VEGFNCYFPLQSYGFQPTNGVGYQPYRVVVLSFELLHAPATVCGPKKSTPLVKNKCVNFNFNGLTGTGVLTESNKKFLP
FQQFGRDIADTTDAVRDPQTLEILDITPCSFGGVSVITPGTNTSNQVAVLYQDVNCTEVPVAIHADQLTPTWRVYSTGS
NVFQTRAGCLIGAEHVNNSYECDIPIGAGICASYQTQTNSPSRAGSVASQSIIAYTMSLGAENSVAYSNNSIAIPTNFTISV
TTEILPVSMTKTSVDCTMYICGDSTECSNLLLQYGSFCTQLNRALTGIAVEQDKNTQEVFAQVKQIYKTPPIKDFGGFNFS
QILPDPSKPSKRSFIEDLLFNKVTLADAGFIKQYGDCLGDIAARDLICAQKFNGLTVLPPLLTDEMIAQYTSALLAGTITCG
WTFGAGPCLQIPFAMQMAYRFNGIGVTQNVLYENQKLIANQFNSAIGKIQDSLSSTPSALGKLQDVVNQNAQALNTL
VKQLSSNFGAISSVLNDILSRLDKVEAEVQIDRLITGRLQSLQTYVTQQLIRAAEIRASANLAATKMSECVLGQSKRVDFC
GKGYHLMSFPQSAPHGVVFLHVTYVPAQEKNFTTAPAICHDGKAHFPREGVFVSNGTHWFVTQRNFYEPQIITTDNTF
VSGNCDVVIGIVNNTVYDPLQPELDSFKEELDKYFKNHTSPDVDLGDISGINASVVNIQKEIDRLNEVAKNLNESLIDLQE
LGKYEQGSGYIPEAPRDGQAYVRKDGEWVLLSTFLGRSLEVLFQGPGSLPETGGGSDYKDDDDKGGGGSGGGGSGGG
GSGGGGSGGGGSHHHHHH
SEQ ID NO 78: SEQ ID NO 2 + A942P + D614N + T572I + N532P
MFVFLVLLPLVSSQCVNLTTRTQLPPAYTNSFTRGVYYPDKVFRSSVLHSTQDLFLPFFSNVTWFHAIHVSGTNGTKRFD
NPVLPFNDGVYFASTEKSNIIRGWIFGTTLDSKTQSLLIVNNATNVVIKVCEFQFCNDPFLGVYYHKNNKSWMESEFRVY
SSANNCTFEYVSQPFLMDLEGKQGNFKNLREFVFKNIDGYFKIYSKHTPINLVRDLPQGFSALEPLVDLPIGINITRFQTLL
ALHRSYLTPGDSSSGWTAGAAAYYVGYLQPRTFLLKYNENGTITDAVDCALDPLSETKCTLKSFTVEKGIYQTSNFRVQP
TESIVRFPNITNLCPFGEVFNATRFASVYAWNRKRISNCVADYSVLYNSASFSTFKCYGVSPTKLNDLCFTNVYADSFVIR
GDEVRQIAPGQTGKIADYNYKLPDDFTGCVIAWNSNNLDSKVGGNYNYLYRLFRKSNLKPFERDISTEIYQAGSTPCNG
VEGFNCYFPLQSYGFQPTNGVGYQPYRVVVLSFELLHAPATVCGPKKSTPLVKNKCVNFNFNGLTGTGVLTESNKKFLP
FQQFGRDIADITDAVRDPQTLEILDITPCSFGGVSVITPGTNTSNQVAVLYQNVNCTEVPVAIHADQLTPTWRVYSTGS
NVFQTRAGCLIGAEHVNNSYECDIPIGAGICASYQTQTNSPSRAGSVASQSIIAYTMSLGAENSVAYSNNSIAIPTNFTISV
TTEILPVSMTKTSVDCTMYICGDSTECSNLLLQYGSFCTQLNRALTGIAVEQDKNTQEVFAQVKQIYKTPPIKDFGGFNFS
QILPDPSKPSKRSFIEDLLFNKVTLADAGFIKQYGDCLGDIAARDLICAQKFNGLTVLPPLLTDEMIAQYTSALLAGTITSG
WTFGAGAALQIPFAMQMAYRFNGIGVTQNVLYENQKLIANQFNSAIGKIQDSLSSTPSALGKLQDVVNQNAQALNTL
VKQLSSNFGAISSVLNDILSRLDKVEAEVQIDRLITGRLQSLQTYVTQQLIRAAEIRASANLAATKMSECVLGQSKRVDFC
GKGYHLMSFPQSAPHGVVFLHVTYVPAQEKNFTTAPAICHDGKAHFPREGVFVSNGTHWFVTQRNFYEPQIITTDNTF
VSGNCDVVIGIVNNTVYDPLQPELDSFKEELDKYFKNHTSPDVDLGDISGINASVVNIQKEIDRLNEVAKNLNESLIDLQE
LGKYEQGSGYIPEAPRDGQAYVRKDGEWVLLSTFLGRSLEVLFQGPGSLPETGGGSDYKDDDDKGGGGSGGGGSGGG
GSGGGGSGGGGSHHHHHH
SEQ ID NO 79: SEQ ID NO 2 + A942P + D614N + T572I + G880C + F888C
MFVFLVLLPLVSSQCVNLTTRTQLPPAYTNSFTRGVYYPDKVFRSSVLHSTQDLFLPFFSNVTWFHAIHVSGTNGTKRFD
NPVLPFNDGVYFASTEKSNIIRGWIFGTTLDSKTQSLLIVNNATNVVIKVCEFQFCNDPFLGVYYHKNNKSWMESEFRVY
SSANNCTFEYVSQPFLMDLEGKQGNFKNLREFVFKNIDGYFKIYSKHTPINLVRDLPQGFSALEPLVDLPIGINITRFQTLL
ALHRSYLTPGDSSSGWTAGAAAYYVGYLQPRTFLLKYNENGTITDAVDCALDPLSETKCTLKSFTVEKGIYQTSNFRVQP
TESIVRFPNITNLCPFGEVFNATRFASVYAWNRKRISNCVADYSVLYNSASFSTFKCYGVSPTKLNDLCFTNVYADSFVIR
GDEVRQIAPGQTGKIADYNYKLPDDFTGCVIAWNSNNLDSKVGGNYNYLYRLFRKSNLKPFERDISTEIYQAGSTPCNG
VEGFNCYFPLQSYGFQPTNGVGYQPYRVVVLSFELLHAPATVCGPKKSTNLVKNKCVNFNFNGLTGTGVLTESNKKFLP
FQQFGRDIADITDAVRDPQTLEILDITPCSFGGVSVITPGTNTSNQVAVLYQNVNCTEVPVAIHADQLTPTWRVYSTGS
NVFQTRAGCLIGAEHVNNSYECDIPIGAGICASYQTQTNSPSRAGSVASQSIIAYTMSLGAENSVAYSNNSIAIPTNFTISV
TTEILPVSMTKTSVDCTMYICGDSTECSNLLLQYGSFCTQLNRALTGIAVEQDKNTQEVFAQVKQIYKTPPIKDFGGFNFS
QILPDPSKPSKRSFIEDLLFNKVTLADAGFIKQYGDCLGDIAARDLICAQKFNGLTVLPPLLTDEMIAQYTSALLACTITSG
WTCGAGAALQIPFAMQMAYRFNGIGVTQNVLYENQKLIANQFNSAIGKIQDSLSSTPSALGKLQDVVNQNAQALNTL
VKQLSSNFGAISSVLNDILSRLDKVEAEVQIDRLITGRLQSLQTYVTQQLIRAAEIRASANLAATKMSECVLGQSKRVDFC
GKGYHLMSFPQSAPHGVVFLHVTYVPAQEKNFTTAPAICHDGKAHFPREGVFVSNGTHWFVTQRNFYEPQIITTDNTF
VSGNCDVVIGIVNNTVYDPLQPELDSFKEELDKYFKNHTSPDVDLGDISGINASVVNIQKEIDRLNEVAKNLNESLIDLQE
LGKYEQGSGYIPEAPRDGQAYVRKDGEWVLLSTFLGRSLEVLFQGPGSLPETGGGSDYKDDDDKGGGGSGGGGSGGG
GSGGGGSGGGGSHHHHHH
SEQ ID NO 80: SEQ ID NO 2 + A942P + D614N + T572I + S884C + A893C
MFVFLVLLPLVSSQCVNLTTRTQLPPAYTNSFTRGVYYPDKVFRSSVLHSTQDLFLPFFSNVTWFHAIHVSGTNGTKRFD
NPVLPFNDGVYFASTEKSNIIRGWIFGTTLDSKTQSLLIVNNATNVVIKVCEFQFCNDPFLGVYYHKNNKSWMESEFRVY
SSANNCTFEYVSQPFLMDLEGKQGNFKNLREFVFKNIDGYFKIYSKHTPINLVRDLPQGFSALEPLVDLPIGINITRFQTLL
ALHRSYLTPGDSSSGWTAGAAAYYVGYLQPRTFLLKYNENGTITDAVDCALDPLSETKCTLKSFTVEKGIYQTSNFRVQP
TESIVRFPNITNLCPFGEVFNATRFASVYAWNRKRISNCVADYSVLYNSASFSTFKCYGVSPTKLNDLCFTNVYADSFVIR
GDEVRQIAPGQTGKIADYNYKLPDDFTGCVIAWNSNNLDSKVGGNYNYLYRLFRKSNLKPFERDISTEIYQAGSTPCNG
VEGFNCYFPLQSYGFQPTNGVGYQPYRVVVLSFELLHAPATVCGPKKSTNLVKNKCVNFNFNGLTGTGVLTESNKKFLP
FQQFGRDIADITDAVRDPQTLEILDITPCSFGGVSVITPGTNTSNQVAVLYQNVNCTEVPVAIHADQLTPTWRVYSTGS
NVFQTRAGCLIGAEHVNNSYECDIPIGAGICASYQTQTNSPSRAGSVASQSIIAYTMSLGAENSVAYSNNSIAIPTNFTISV
TTEILPVSMTKTSVDCTMYICGDSTECSNLLLQYGSFCTQLNRALTGIAVEQDKNTQEVFAQVKQIYKTPPIKDFGGFNFS
QILPDPSKPSKRSFIEDLLFNKVTLADAGFIKQYGDCLGDIAARDLICAQKFNGLTVLPPLLTDEMIAQYTSALLAGTITCG
WTFGAGACLQIPFAMQMAYRFNGIGVTQNVLYENQKLIANQFNSAIGKIQDSLSSTPSALGKLQDVVNQNAQALNTL
VKQLSSNFGAISSVLNDILSRLDKVEAEVQIDRLITGRLQSLQTYVTQQLIRAAEIRASANLAATKMSECVLGQSKRVDFC
GKGYHLMSFPQSAPHGVVFLHVTYVPAQEKNFTTAPAICHDGKAHFPREGVFVSNGTHWFVTQRNFYEPQIITTDNTF
VSGNCDVVIGIVNNTVYDPLQPELDSFKEELDKYFKNHTSPDVDLGDISGINASVVNIQKEIDRLNEVAKNLNESLIDLQE
LGKYEQGSGYIPEAPRDGQAYVRKDGEWVLLSTFLGRSLEVLFQGPGSLPETGGGSDYKDDDDKGGGGSGGGGSGGG
GSGGGGSGGGGSHHHHHH
SEQ ID NO 81: SEQ ID NO 2 + A942P + D614N + N532P + G880C + F888C
MFVFLVLLPLVSSQCVNLTTRTQLPPAYTNSFTRGVYYPDKVFRSSVLHSTQDLFLPFFSNVTWFHAIHVSGTNGTKRFD
NPVLPFNDGVYFASTEKSNIIRGWIFGTTLDSKTQSLLIVNNATNVVIKVCEFQFCNDPFLGVYYHKNNKSWMESEFRVY
SSANNCTFEYVSQPFLMDLEGKQGNFKNLREFVFKNIDGYFKIYSKHTPINLVRDLPQGFSALEPLVDLPIGINITRFQTLL
ALHRSYLTPGDSSSGWTAGAAAYYVGYLQPRTFLLKYNENGTITDAVDCALDPLSETKCTLKSFTVEKGIYQTSNFRVQP
TESIVRFPNITNLCPFGEVFNATRFASVYAWNRKRISNCVADYSVLYNSASFSTFKCYGVSPTKLNDLCFTNVYADSFVIR
GDEVRQIAPGQTGKIADYNYKLPDDFTGCVIAWNSNNLDSKVGGNYNYLYRLFRKSNLKPFERDISTEIYQAGSTPCNG
VEGFNCYFPLQSYGFQPTNGVGYQPYRVVVLSFELLHAPATVCGPKKSTPLVKNKCVNFNFNGLTGTGVLTESNKKFLP
FQQFGRDIADTTDAVRDPQTLEILDITPCSFGGVSVITPGTNTSNQVAVLYQNVNCTEVPVAIHADQLTPTWRVYSTGS
NVFQTRAGCLIGAEHVNNSYECDIPIGAGICASYQTQTNSPSRAGSVASQSIIAYTMSLGAENSVAYSNNSIAIPTNFTISV
TTEILPVSMTKTSVDCTMYICGDSTECSNLLLQYGSFCTQLNRALTGIAVEQDKNTQEVFAQVKQIYKTPPIKDFGGFNFS
QILPDPSKPSKRSFIEDLLFNKVTLADAGFIKQYGDCLGDIAARDLICAQKFNGLTVLPPLLTDEMIAQYTSALLACTITSG
WTCGAGAALQIPFAMQMAYRFNGIGVTQNVLYENQKLIANQFNSAIGKIQDSLSSTPSALGKLQDVVNQNAQALNTL
VKQLSSNFGAISSVLNDILSRLDKVEAEVQIDRLITGRLQSLQTYVTQQLIRAAEIRASANLAATKMSECVLGQSKRVDFC
GKGYHLMSFPQSAPHGVVFLHVTYVPAQEKNFTTAPAICHDGKAHFPREGVFVSNGTHWFVTQRNFYEPQIITTDNTF
VSGNCDVVIGIVNNTVYDPLQPELDSFKEELDKYFKNHTSPDVDLGDISGINASVVNIQKEIDRLNEVAKNLNESLIDLQE
LGKYEQGSGYIPEAPRDGQAYVRKDGEWVLLSTFLGRSLEVLFQGPGSLPETGGGSDYKDDDDKGGGGSGGGGSGGG
GSGGGGSGGGGSHHHHHH
SEQ ID NO 82: SEQ ID NO 2 + A942P + D614N + N532P + S884C + A893C
MFVFLVLLPLVSSQCVNLTTRTQLPPAYTNSFTRGVYYPDKVFRSSVLHSTQDLFLPFFSNVTWFHAIHVSGTNGTKRFD
NPVLPFNDGVYFASTEKSNIIRGWIFGTTLDSKTQSLLIVNNATNVVIKVCEFQFCNDPFLGVYYHKNNKSWMESEFRVY
SSANNCTFEYVSQPFLMDLEGKQGNFKNLREFVFKNIDGYFKIYSKHTPINLVRDLPQGFSALEPLVDLPIGINITRFQTLL
ALHRSYLTPGDSSSGWTAGAAAYYVGYLQPRTFLLKYNENGTITDAVDCALDPLSETKCTLKSFTVEKGIYQTSNFRVQP
TESIVRFPNITNLCPFGEVFNATRFASVYAWNRKRISNCVADYSVLYNSASFSTFKCYGVSPTKLNDLCFTNVYADSFVIR
GDEVRQIAPGQTGKIADYNYKLPDDFTGCVIAWNSNNLDSKVGGNYNYLYRLFRKSNLKPFERDISTEIYQAGSTPCNG
VEGFNCYFPLQSYGFQPTNGVGYQPYRVVVLSFELLHAPATVCGPKKSTPLVKNKCVNFNFNGLTGTGVLTESNKKFLP
FQQFGRDIADTTDAVRDPQTLEILDITPCSFGGVSVITPGTNTSNQVAVLYQNVNCTEVPVAIHADQLTPTWRVYSTGS
NVFQTRAGCLIGAEHVNNSYECDIPIGAGICASYQTQTNSPSRAGSVASQSIIAYTMSLGAENSVAYSNNSIAIPTNFTISV
TTEILPVSMTKTSVDCTMYICGDSTECSNLLLQYGSFCTQLNRALTGIAVEQDKNTQEVFAQVKQIYKTPPIKDFGGFNFS
QILPDPSKPSKRSFIEDLLFNKVTLADAGFIKQYGDCLGDIAARDLICAQKFNGLTVLPPLLTDEMIAQYTSALLAGTITCG
WTFGAGACLQIPFAMQMAYRFNGIGVTQNVLYENQKLIANQFNSAIGKIQDSLSSTPSALGKLQDVVNQNAQALNTL
VKQLSSNFGAISSVLNDILSRLDKVEAEVQIDRLITGRLQSLQTYVTQQLIRAAEIRASANLAATKMSECVLGQSKRVDFC
GKGYHLMSFPQSAPHGVVFLHVTYVPAQEKNFTTAPAICHDGKAHFPREGVFVSNGTHWFVTQRNFYEPQIITTDNTF
VSGNCDVVIGIVNNTVYDPLQPELDSFKEELDKYFKNHTSPDVDLGDISGINASVVNIQKEIDRLNEVAKNLNESLIDLQE
LGKYEQGSGYIPEAPRDGQAYVRKDGEWVLLSTFLGRSLEVLFQGPGSLPETGGGSDYKDDDDKGGGGSGGGGSGGG
GSGGGGSGGGGSHHHHHH
SEQ ID NO 83: SEQ ID NO 2 + A942P + T572I + N532P + G880C + F888C
MFVFLVLLPLVSSQCVNLTTRTQLPPAYTNSFTRGVYYPDKVFRSSVLHSTQDLFLPFFSNVTWFHAIHVSGTNGTKRFD
NPVLPFNDGVYFASTEKSNIIRGWIFGTTLDSKTQSLLIVNNATNVVIKVCEFQFCNDPFLGVYYHKNNKSWMESEFRVY
SSANNCTFEYVSQPFLMDLEGKQGNFKNLREFVFKNIDGYFKIYSKHTPINLVRDLPQGFSALEPLVDLPIGINITRFQTLL
ALHRSYLTPGDSSSGWTAGAAAYYVGYLQPRTFLLKYNENGTITDAVDCALDPLSETKCTLKSFTVEKGIYQTSNFRVQP
TESIVRFPNITNLCPFGEVFNATRFASVYAWNRKRISNCVADYSVLYNSASFSTFKCYGVSPTKLNDLCFTNVYADSFVIR
GDEVRQIAPGQTGKIADYNYKLPDDFTGCVIAWNSNNLDSKVGGNYNYLYRLFRKSNLKPFERDISTEIYQAGSTPCNG
VEGFNCYFPLQSYGFQPTNGVGYQPYRVVVLSFELLHAPATVCGPKKSTPLVKNKCVNFNFNGLTGTGVLTESNKKFLP
FQQFGRDIADITDAVRDPQTLEILDITPCSFGGVSVITPGTNTSNQVAVLYQDVNCTEVPVAIHADQLTPTWRVYSTGS
NVFQTRAGCLIGAEHVNNSYECDIPIGAGICASYQTQTNSPSRAGSVASQSIIAYTMSLGAENSVAYSNNSIAIPTNFTISV
TTEILPVSMTKTSVDCTMYICGDSTECSNLLLQYGSFCTQLNRALTGIAVEQDKNTQEVFAQVKQIYKTPPIKDFGGFNFS
QILPDPSKPSKRSFIEDLLFNKVTLADAGFIKQYGDCLGDIAARDLICAQKFNGLTVLPPLLTDEMIAQYTSALLACTITSG
WTCGAGAALQIPFAMQMAYRFNGIGVTQNVLYENQKLIANQFNSAIGKIQDSLSSTPSALGKLQDVVNQNAQALNTL
VKQLSSNFGAISSVLNDILSRLDKVEAEVQIDRLITGRLQSLQTYVTQQLIRAAEIRASANLAATKMSECVLGQSKRVDFC
GKGYHLMSFPQSAPHGVVFLHVTYVPAQEKNFTTAPAICHDGKAHFPREGVFVSNGTHWFVTQRNFYEPQIITTDNTF
VSGNCDVVIGIVNNTVYDPLQPELDSFKEELDKYFKNHTSPDVDLGDISGINASVVNIQKEIDRLNEVAKNLNESLIDLQE
LGKYEQGSGYIPEAPRDGQAYVRKDGEWVLLSTFLGRSLEVLFQGPGSLPETGGGSDYKDDDDKGGGGSGGGGSGGG
GSGGGGSGGGGSHHHHHH
SEQ ID NO 84: SEQ ID NO 2 + A942P + T572I + N532P + S884C + A893C
MFVFLVLLPLVSSQCVNLTTRTQLPPAYTNSFTRGVYYPDKVFRSSVLHSTQDLFLPFFSNVTWFHAIHVSGTNGTKRFD
NPVLPFNDGVYFASTEKSNIIRGWIFGTTLDSKTQSLLIVNNATNVVIKVCEFQFCNDPFLGVYYHKNNKSWMESEFRVY
SSANNCTFEYVSQPFLMDLEGKQGNFKNLREFVFKNIDGYFKIYSKHTPINLVRDLPQGFSALEPLVDLPIGINITRFQTLL
ALHRSYLTPGDSSSGWTAGAAAYYVGYLQPRTFLLKYNENGTITDAVDCALDPLSETKCTLKSFTVEKGIYQTSNFRVQP
TESIVRFPNITNLCPFGEVFNATRFASVYAWNRKRISNCVADYSVLYNSASFSTFKCYGVSPTKLNDLCFTNVYADSFVIR
GDEVRQIAPGQTGKIADYNYKLPDDFTGCVIAWNSNNLDSKVGGNYNYLYRLFRKSNLKPFERDISTEIYQAGSTPCNG
VEGFNCYFPLQSYGFQPTNGVGYQPYRVVVLSFELLHAPATVCGPKKSTPLVKNKCVNFNFNGLTGTGVLTESNKKFLP
FQQFGRDIADITDAVRDPQTLEILDITPCSFGGVSVITPGTNTSNQVAVLYQDVNCTEVPVAIHADQLTPTWRVYSTGS
NVFQTRAGCLIGAEHVNNSYECDIPIGAGICASYQTQTNSPSRAGSVASQSIIAYTMSLGAENSVAYSNNSIAIPTNFTISV
TTEILPVSMTKTSVDCTMYICGDSTECSNLLLQYGSFCTQLNRALTGIAVEQDKNTQEVFAQVKQIYKTPPIKDFGGFNFS
QILPDPSKPSKRSFIEDLLFNKVTLADAGFIKQYGDCLGDIAARDLICAQKFNGLTVLPPLLTDEMIAQYTSALLAGTITCG
WTFGAGACLQIPFAMQMAYRFNGIGVTQNVLYENQKLIANQFNSAIGKIQDSLSSTPSALGKLQDVVNQNAQALNTL
VKQLSSNFGAISSVLNDILSRLDKVEAEVQIDRLITGRLQSLQTYVTQQLIRAAEIRASANLAATKMSECVLGQSKRVDFC
GKGYHLMSFPQSAPHGVVFLHVTYVPAQEKNFTTAPAICHDGKAHFPREGVFVSNGTHWFVTQRNFYEPQIITTDNTF
VSGNCDVVIGIVNNTVYDPLQPELDSFKEELDKYFKNHTSPDVDLGDISGINASVVNIQKEIDRLNEVAKNLNESLIDLQE
LGKYEQGSGYIPEAPRDGQAYVRKDGEWVLLSTFLGRSLEVLFQGPGSLPETGGGSDYKDDDDKGGGGSGGGGSGGG
GSGGGGSGGGGSHHHHHH
SEQ ID NO 85: SEQ ID NO 2 + A892P + D614N + T572I + N532P
MFVFLVLLPLVSSQCVNLTTRTQLPPAYTNSFTRGVYYPDKVFRSSVLHSTQDLFLPFFSNVTWFHAIHVSGTNGTKRFD
NPVLPFNDGVYFASTEKSNIIRGWIFGTTLDSKTQSLLIVNNATNVVIKVCEFQFCNDPFLGVYYHKNNKSWMESEFRVY
SSANNCTFEYVSQPFLMDLEGKQGNFKNLREFVFKNIDGYFKIYSKHTPINLVRDLPQGFSALEPLVDLPIGINITRFQTLL
ALHRSYLTPGDSSSGWTAGAAAYYVGYLQPRTFLLKYNENGTITDAVDCALDPLSETKCTLKSFTVEKGIYQTSNFRVQP
TESIVRFPNITNLCPFGEVFNATRFASVYAWNRKRISNCVADYSVLYNSASFSTFKCYGVSPTKLNDLCFTNVYADSFVIR
GDEVRQIAPGQTGKIADYNYKLPDDFTGCVIAWNSNNLDSKVGGNYNYLYRLFRKSNLKPFERDISTEIYQAGSTPCNG
VEGFNCYFPLQSYGFQPTNGVGYQPYRVVVLSFELLHAPATVCGPKKSTPLVKNKCVNFNFNGLTGTGVLTESNKKFLP
FQQFGRDIADITDAVRDPQTLEILDITPCSFGGVSVITPGTNTSNQVAVLYQNVNCTEVPVAIHADQLTPTWRVYSTGS
NVFQTRAGCLIGAEHVNNSYECDIPIGAGICASYQTQTNSPSRAGSVASQSIIAYTMSLGAENSVAYSNNSIAIPTNFTISV
TTEILPVSMTKTSVDCTMYICGDSTECSNLLLQYGSFCTQLNRALTGIAVEQDKNTQEVFAQVKQIYKTPPIKDFGGFNFS
QILPDPSKPSKRSFIEDLLFNKVTLADAGFIKQYGDCLGDIAARDLICAQKFNGLTVLPPLLTDEMIAQYTSALLAGTITSG
WTFGAGPALQIPFAMQMAYRFNGIGVTQNVLYENQKLIANQFNSAIGKIQDSLSSTASALGKLQDVVNQNAQALNTL
VKQLSSNFGAISSVLNDILSRLDKVEAEVQIDRLITGRLQSLQTYVTQQLIRAAEIRASANLAATKMSECVLGQSKRVDFC
GKGYHLMSFPQSAPHGVVFLHVTYVPAQEKNFTTAPAICHDGKAHFPREGVFVSNGTHWFVTQRNFYEPQIITTDNTF
VSGNCDVVIGIVNNTVYDPLQPELDSFKEELDKYFKNHTSPDVDLGDISGINASVVNIQKEIDRLNEVAKNLNESLIDLQE
LGKYEQGSGYIPEAPRDGQAYVRKDGEWVLLSTFLGRSLEVLFQGPGSLPETGGGSDYKDDDDKGGGGSGGGGSGGG
GSGGGGSGGGGSHHHHHH
SEQ ID NO 86: SEQ ID NO 2 + A892P + D614N + T572I + G880C + F888C
MFVFLVLLPLVSSQCVNLTTRTQLPPAYTNSFTRGVYYPDKVFRSSVLHSTQDLFLPFFSNVTWFHAIHVSGTNGTKRFD
NPVLPFNDGVYFASTEKSNIIRGWIFGTTLDSKTQSLLIVNNATNVVIKVCEFQFCNDPFLGVYYHKNNKSWMESEFRVY
SSANNCTFEYVSQPFLMDLEGKQGNFKNLREFVFKNIDGYFKIYSKHTPINLVRDLPQGFSALEPLVDLPIGINITRFQTLL
ALHRSYLTPGDSSSGWTAGAAAYYVGYLQPRTFLLKYNENGTITDAVDCALDPLSETKCTLKSFTVEKGIYQTSNFRVQP
TESIVRFPNITNLCPFGEVFNATRFASVYAWNRKRISNCVADYSVLYNSASFSTFKCYGVSPTKLNDLCFTNVYADSFVIR
GDEVRQIAPGQTGKIADYNYKLPDDFTGCVIAWNSNNLDSKVGGNYNYLYRLFRKSNLKPFERDISTEIYQAGSTPCNG
VEGFNCYFPLQSYGFQPTNGVGYQPYRVVVLSFELLHAPATVCGPKKSTNLVKNKCVNFNFNGLTGTGVLTESNKKFLP
FQQFGRDIADITDAVRDPQTLEILDITPCSFGGVSVITPGTNTSNQVAVLYQNVNCTEVPVAIHADQLTPTWRVYSTGS
NVFQTRAGCLIGAEHVNNSYECDIPIGAGICASYQTQTNSPSRAGSVASQSIIAYTMSLGAENSVAYSNNSIAIPTNFTISV
TTEILPVSMTKTSVDCTMYICGDSTECSNLLLQYGSFCTQLNRALTGIAVEQDKNTQEVFAQVKQIYKTPPIKDFGGFNFS
QILPDPSKPSKRSFIEDLLFNKVTLADAGFIKQYGDCLGDIAARDLICAQKFNGLTVLPPLLTDEMIAQYTSALLACTITSG
WTCGAGPALQIPFAMQMAYRFNGIGVTQNVLYENQKLIANQFNSAIGKIQDSLSSTASALGKLQDVVNQNAQALNTL
VKQLSSNFGAISSVLNDILSRLDKVEAEVQIDRLITGRLQSLQTYVTQQLIRAAEIRASANLAATKMSECVLGQSKRVDFC
GKGYHLMSFPQSAPHGVVFLHVTYVPAQEKNFTTAPAICHDGKAHFPREGVFVSNGTHWFVTQRNFYEPQIITTDNTF
VSGNCDVVIGIVNNTVYDPLQPELDSFKEELDKYFKNHTSPDVDLGDISGINASVVNIQKEIDRLNEVAKNLNESLIDLQE
LGKYEQGSGYIPEAPRDGQAYVRKDGEWVLLSTFLGRSLEVLFQGPGSLPETGGGSDYKDDDDKGGGGSGGGGSGGG
GSGGGGSGGGGSHHHHHH
SEQ ID NO 87: SEQ ID NO 2 + A892P + D614N + T572I + S884C + A893C
MFVFLVLLPLVSSQCVNLTTRTQLPPAYTNSFTRGVYYPDKVFRSSVLHSTQDLFLPFFSNVTWFHAIHVSGTNGTKRFD
NPVLPFNDGVYFASTEKSNIIRGWIFGTTLDSKTQSLLIVNNATNVVIKVCEFQFCNDPFLGVYYHKNNKSWMESEFRVY
SSANNCTFEYVSQPFLMDLEGKQGNFKNLREFVFKNIDGYFKIYSKHTPINLVRDLPQGFSALEPLVDLPIGINITRFQTLL
ALHRSYLTPGDSSSGWTAGAAAYYVGYLQPRTFLLKYNENGTITDAVDCALDPLSETKCTLKSFTVEKGIYQTSNFRVQP
TESIVRFPNITNLCPFGEVFNATRFASVYAWNRKRISNCVADYSVLYNSASFSTFKCYGVSPTKLNDLCFTNVYADSFVIR
GDEVRQIAPGQTGKIADYNYKLPDDFTGCVIAWNSNNLDSKVGGNYNYLYRLFRKSNLKPFERDISTEIYQAGSTPCNG
VEGFNCYFPLQSYGFQPTNGVGYQPYRVVVLSFELLHAPATVCGPKKSTNLVKNKCVNFNFNGLTGTGVLTESNKKFLP
FQQFGRDIADITDAVRDPQTLEILDITPCSFGGVSVITPGTNTSNQVAVLYQNVNCTEVPVAIHADQLTPTWRVYSTGS
NVFQTRAGCLIGAEHVNNSYECDIPIGAGICASYQTQTNSPSRAGSVASQSIIAYTMSLGAENSVAYSNNSIAIPTNFTISV
TTEILPVSMTKTSVDCTMYICGDSTECSNLLLQYGSFCTQLNRALTGIAVEQDKNTQEVFAQVKQIYKTPPIKDFGGFNFS
QILPDPSKPSKRSFIEDLLFNKVTLADAGFIKQYGDCLGDIAARDLICAQKFNGLTVLPPLLTDEMIAQYTSALLAGTITCG
WTFGAGPCLQIPFAMQMAYRFNGIGVTQNVLYENQKLIANQFNSAIGKIQDSLSSTASALGKLQDVVNQNAQALNTL
VKQLSSNFGAISSVLNDILSRLDKVEAEVQIDRLITGRLQSLQTYVTQQLIRAAEIRASANLAATKMSECVLGQSKRVDFC
GKGYHLMSFPQSAPHGVVFLHVTYVPAQEKNFTTAPAICHDGKAHFPREGVFVSNGTHWFVTQRNFYEPQIITTDNTF
VSGNCDVVIGIVNNTVYDPLQPELDSFKEELDKYFKNHTSPDVDLGDISGINASVVNIQKEIDRLNEVAKNLNESLIDLQE
LGKYEQGSGYIPEAPRDGQAYVRKDGEWVLLSTFLGRSLEVLFQGPGSLPETGGGSDYKDDDDKGGGGSGGGGSGGG
GSGGGGSGGGGSHHHHHH
SEQ ID NO 88: SEQ ID NO 2 + A892P + D614N + N532P + G880C + F888C
MFVFLVLLPLVSSQCVNLTTRTQLPPAYTNSFTRGVYYPDKVFRSSVLHSTQDLFLPFFSNVTWFHAIHVSGTNGTKRFD
NPVLPFNDGVYFASTEKSNIIRGWIFGTTLDSKTQSLLIVNNATNVVIKVCEFQFCNDPFLGVYYHKNNKSWMESEFRVY
SSANNCTFEYVSQPFLMDLEGKQGNFKNLREFVFKNIDGYFKIYSKHTPINLVRDLPQGFSALEPLVDLPIGINITRFQTLL
ALHRSYLTPGDSSSGWTAGAAAYYVGYLQPRTFLLKYNENGTITDAVDCALDPLSETKCTLKSFTVEKGIYQTSNFRVQP
TESIVRFPNITNLCPFGEVFNATRFASVYAWNRKRISNCVADYSVLYNSASFSTFKCYGVSPTKLNDLCFTNVYADSFVIR
GDEVRQIAPGQTGKIADYNYKLPDDFTGCVIAWNSNNLDSKVGGNYNYLYRLFRKSNLKPFERDISTEIYQAGSTPCNG
VEGFNCYFPLQSYGFQPTNGVGYQPYRVVVLSFELLHAPATVCGPKKSTPLVKNKCVNFNFNGLTGTGVLTESNKKFLP
FQQFGRDIADTTDAVRDPQTLEILDITPCSFGGVSVITPGTNTSNQVAVLYQNVNCTEVPVAIHADQLTPTWRVYSTGS
NVFQTRAGCLIGAEHVNNSYECDIPIGAGICASYQTQTNSPSRAGSVASQSIIAYTMSLGAENSVAYSNNSIAIPTNFTISV
TTEILPVSMTKTSVDCTMYICGDSTECSNLLLQYGSFCTQLNRALTGIAVEQDKNTQEVFAQVKQIYKTPPIKDFGGFNFS
QILPDPSKPSKRSFIEDLLFNKVTLADAGFIKQYGDCLGDIAARDLICAQKFNGLTVLPPLLTDEMIAQYTSALLACTITSG
WTCGAGPALQIPFAMQMAYRFNGIGVTQNVLYENQKLIANQFNSAIGKIQDSLSSTASALGKLQDVVNQNAQALNTL
VKQLSSNFGAISSVLNDILSRLDKVEAEVQIDRLITGRLQSLQTYVTQQLIRAAEIRASANLAATKMSECVLGQSKRVDFC
GKGYHLMSFPQSAPHGVVFLHVTYVPAQEKNFTTAPAICHDGKAHFPREGVFVSNGTHWFVTQRNFYEPQIITTDNTF
VSGNCDVVIGIVNNTVYDPLQPELDSFKEELDKYFKNHTSPDVDLGDISGINASVVNIQKEIDRLNEVAKNLNESLIDLQE
LGKYEQGSGYIPEAPRDGQAYVRKDGEWVLLSTFLGRSLEVLFQGPGSLPETGGGSDYKDDDDKGGGGSGGGGSGGG
GSGGGGSGGGGSHHHHHH
SEQ ID NO 89: SEQ ID NO 2 + A892P + D614N + N532P + S884C + A893C
MFVFLVLLPLVSSQCVNLTTRTQLPPAYTNSFTRGVYYPDKVFRSSVLHSTQDLFLPFFSNVTWFHAIHVSGTNGTKRFD
NPVLPFNDGVYFASTEKSNIIRGWIFGTTLDSKTQSLLIVNNATNVVIKVCEFQFCNDPFLGVYYHKNNKSWMESEFRVY
SSANNCTFEYVSQPFLMDLEGKQGNFKNLREFVFKNIDGYFKIYSKHTPINLVRDLPQGFSALEPLVDLPIGINITRFQTLL
ALHRSYLTPGDSSSGWTAGAAAYYVGYLQPRTFLLKYNENGTITDAVDCALDPLSETKCTLKSFTVEKGIYQTSNFRVQP
TESIVRFPNITNLCPFGEVFNATRFASVYAWNRKRISNCVADYSVLYNSASFSTFKCYGVSPTKLNDLCFTNVYADSFVIR
GDEVRQIAPGQTGKIADYNYKLPDDFTGCVIAWNSNNLDSKVGGNYNYLYRLFRKSNLKPFERDISTEIYQAGSTPCNG
VEGFNCYFPLQSYGFQPTNGVGYQPYRVVVLSFELLHAPATVCGPKKSTPLVKNKCVNFNFNGLTGTGVLTESNKKFLP
FQQFGRDIADTTDAVRDPQTLEILDITPCSFGGVSVITPGTNTSNQVAVLYQNVNCTEVPVAIHADQLTPTWRVYSTGS
NVFQTRAGCLIGAEHVNNSYECDIPIGAGICASYQTQTNSPSRAGSVASQSIIAYTMSLGAENSVAYSNNSIAIPTNFTISV
TTEILPVSMTKTSVDCTMYICGDSTECSNLLLQYGSFCTQLNRALTGIAVEQDKNTQEVFAQVKQIYKTPPIKDFGGFNFS
QILPDPSKPSKRSFIEDLLFNKVTLADAGFIKQYGDCLGDIAARDLICAQKFNGLTVLPPLLTDEMIAQYTSALLAGTITCG
WTFGAGPCLQIPFAMQMAYRFNGIGVTQNVLYENQKLIANQFNSAIGKIQDSLSSTASALGKLQDVVNQNAQALNTL
VKQLSSNFGAISSVLNDILSRLDKVEAEVQIDRLITGRLQSLQTYVTQQLIRAAEIRASANLAATKMSECVLGQSKRVDFC
GKGYHLMSFPQSAPHGVVFLHVTYVPAQEKNFTTAPAICHDGKAHFPREGVFVSNGTHWFVTQRNFYEPQIITTDNTF
VSGNCDVVIGIVNNTVYDPLQPELDSFKEELDKYFKNHTSPDVDLGDISGINASVVNIQKEIDRLNEVAKNLNESLIDLQE
LGKYEQGSGYIPEAPRDGQAYVRKDGEWVLLSTFLGRSLEVLFQGPGSLPETGGGSDYKDDDDKGGGGSGGGGSGGG
GSGGGGSGGGGSHHHHHH
SEQ ID NO 90: SEQ ID NO 2 + A892P + T572I + N532P + G880C + F888C
MFVFLVLLPLVSSQCVNLTTRTQLPPAYTNSFTRGVYYPDKVFRSSVLHSTQDLFLPFFSNVTWFHAIHVSGTNGTKRFD
NPVLPFNDGVYFASTEKSNIIRGWIFGTTLDSKTQSLLIVNNATNVVIKVCEFQFCNDPFLGVYYHKNNKSWMESEFRVY
SSANNCTFEYVSQPFLMDLEGKQGNFKNLREFVFKNIDGYFKIYSKHTPINLVRDLPQGFSALEPLVDLPIGINITRFQTLL
ALHRSYLTPGDSSSGWTAGAAAYYVGYLQPRTFLLKYNENGTITDAVDCALDPLSETKCTLKSFTVEKGIYQTSNFRVQP
TESIVRFPNITNLCPFGEVFNATRFASVYAWNRKRISNCVADYSVLYNSASFSTFKCYGVSPTKLNDLCFTNVYADSFVIR
GDEVRQIAPGQTGKIADYNYKLPDDFTGCVIAWNSNNLDSKVGGNYNYLYRLFRKSNLKPFERDISTEIYQAGSTPCNG
VEGFNCYFPLQSYGFQPTNGVGYQPYRVVVLSFELLHAPATVCGPKKSTPLVKNKCVNFNFNGLTGTGVLTESNKKFLP
FQQFGRDIADITDAVRDPQTLEILDITPCSFGGVSVITPGTNTSNQVAVLYQDVNCTEVPVAIHADQLTPTWRVYSTGS
NVFQTRAGCLIGAEHVNNSYECDIPIGAGICASYQTQTNSPSRAGSVASQSIIAYTMSLGAENSVAYSNNSIAIPTNFTISV
TTEILPVSMTKTSVDCTMYICGDSTECSNLLLQYGSFCTQLNRALTGIAVEQDKNTQEVFAQVKQIYKTPPIKDFGGFNFS
QILPDPSKPSKRSFIEDLLFNKVTLADAGFIKQYGDCLGDIAARDLICAQKFNGLTVLPPLLTDEMIAQYTSALLACTITSG
WTCGAGPALQIPFAMQMAYRFNGIGVTQNVLYENQKLIANQFNSAIGKIQDSLSSTASALGKLQDVVNQNAQALNTL
VKQLSSNFGAISSVLNDILSRLDKVEAEVQIDRLITGRLQSLQTYVTQQLIRAAEIRASANLAATKMSECVLGQSKRVDFC
GKGYHLMSFPQSAPHGVVFLHVTYVPAQEKNFTTAPAICHDGKAHFPREGVFVSNGTHWFVTQRNFYEPQIITTDNTF
VSGNCDVVIGIVNNTVYDPLQPELDSFKEELDKYFKNHTSPDVDLGDISGINASVVNIQKEIDRLNEVAKNLNESLIDLQE
LGKYEQGSGYIPEAPRDGQAYVRKDGEWVLLSTFLGRSLEVLFQGPGSLPETGGGSDYKDDDDKGGGGSGGGGSGGG
GSGGGGSGGGGSHHHHHH
SEQ ID NO 91: SEQ ID NO 2 + A892P + T572I + N532P + S884C + A893C
MFVFLVLLPLVSSQCVNLTTRTQLPPAYTNSFTRGVYYPDKVFRSSVLHSTQDLFLPFFSNVTWFHAIHVSGTNGTKRFD
NPVLPFNDGVYFASTEKSNIIRGWIFGTTLDSKTQSLLIVNNATNVVIKVCEFQFCNDPFLGVYYHKNNKSWMESEFRVY
SSANNCTFEYVSQPFLMDLEGKQGNFKNLREFVFKNIDGYFKIYSKHTPINLVRDLPQGFSALEPLVDLPIGINITRFQTLL
ALHRSYLTPGDSSSGWTAGAAAYYVGYLQPRTFLLKYNENGTITDAVDCALDPLSETKCTLKSFTVEKGIYQTSNFRVQP
TESIVRFPNITNLCPFGEVFNATRFASVYAWNRKRISNCVADYSVLYNSASFSTFKCYGVSPTKLNDLCFTNVYADSFVIR
GDEVRQIAPGQTGKIADYNYKLPDDFTGCVIAWNSNNLDSKVGGNYNYLYRLFRKSNLKPFERDISTEIYQAGSTPCNG
VEGFNCYFPLQSYGFQPTNGVGYQPYRVVVLSFELLHAPATVCGPKKSTPLVKNKCVNFNFNGLTGTGVLTESNKKFLP
FQQFGRDIADITDAVRDPQTLEILDITPCSFGGVSVITPGTNTSNQVAVLYQDVNCTEVPVAIHADQLTPTWRVYSTGS
NVFQTRAGCLIGAEHVNNSYECDIPIGAGICASYQTQTNSPSRAGSVASQSIIAYTMSLGAENSVAYSNNSIAIPTNFTISV
TTEILPVSMTKTSVDCTMYICGDSTECSNLLLQYGSFCTQLNRALTGIAVEQDKNTQEVFAQVKQIYKTPPIKDFGGFNFS
QILPDPSKPSKRSFIEDLLFNKVTLADAGFIKQYGDCLGDIAARDLICAQKFNGLTVLPPLLTDEMIAQYTSALLAGTITCG
WTFGAGPCLQIPFAMQMAYRFNGIGVTQNVLYENQKLIANQFNSAIGKIQDSLSSTASALGKLQDVVNQNAQALNTL
VKQLSSNFGAISSVLNDILSRLDKVEAEVQIDRLITGRLQSLQTYVTQQLIRAAEIRASANLAATKMSECVLGQSKRVDFC
GKGYHLMSFPQSAPHGVVFLHVTYVPAQEKNFTTAPAICHDGKAHFPREGVFVSNGTHWFVTQRNFYEPQIITTDNTF
VSGNCDVVIGIVNNTVYDPLQPELDSFKEELDKYFKNHTSPDVDLGDISGINASVVNIQKEIDRLNEVAKNLNESLIDLQE
LGKYEQGSGYIPEAPRDGQAYVRKDGEWVLLSTFLGRSLEVLFQGPGSLPETGGGSDYKDDDDKGGGGSGGGGSGGG
GSGGGGSGGGGSHHHHHH
SEQ ID NO 92: SEQ ID NO 2 + D614N + T572I + N532P + G880C + F888C
MFVFLVLLPLVSSQCVNLTTRTQLPPAYTNSFTRGVYYPDKVFRSSVLHSTQDLFLPFFSNVTWFHAIHVSGTNGTKRFD
NPVLPFNDGVYFASTEKSNIIRGWIFGTTLDSKTQSLLIVNNATNVVIKVCEFQFCNDPFLGVYYHKNNKSWMESEFRVY
SSANNCTFEYVSQPFLMDLEGKQGNFKNLREFVFKNIDGYFKIYSKHTPINLVRDLPQGFSALEPLVDLPIGINITRFQTLL
ALHRSYLTPGDSSSGWTAGAAAYYVGYLQPRTFLLKYNENGTITDAVDCALDPLSETKCTLKSFTVEKGIYQTSNFRVQP
TESIVRFPNITNLCPFGEVFNATRFASVYAWNRKRISNCVADYSVLYNSASFSTFKCYGVSPTKLNDLCFTNVYADSFVIR
GDEVRQIAPGQTGKIADYNYKLPDDFTGCVIAWNSNNLDSKVGGNYNYLYRLFRKSNLKPFERDISTEIYQAGSTPCNG
VEGFNCYFPLQSYGFQPTNGVGYQPYRVVVLSFELLHAPATVCGPKKSTPLVKNKCVNFNFNGLTGTGVLTESNKKFLP
FQQFGRDIADITDAVRDPQTLEILDITPCSFGGVSVITPGTNTSNQVAVLYQNVNCTEVPVAIHADQLTPTWRVYSTGS
NVFQTRAGCLIGAEHVNNSYECDIPIGAGICASYQTQTNSPSRAGSVASQSIIAYTMSLGAENSVAYSNNSIAIPTNFTISV
TTEILPVSMTKTSVDCTMYICGDSTECSNLLLQYGSFCTQLNRALTGIAVEQDKNTQEVFAQVKQIYKTPPIKDFGGFNFS
QILPDPSKPSKRSFIEDLLFNKVTLADAGFIKQYGDCLGDIAARDLICAQKFNGLTVLPPLLTDEMIAQYTSALLACTITSG
WTCGAGAALQIPFAMQMAYRFNGIGVTQNVLYENQKLIANQFNSAIGKIQDSLSSTASALGKLQDVVNQNAQALNTL
VKQLSSNFGAISSVLNDILSRLDKVEAEVQIDRLITGRLQSLQTYVTQQLIRAAEIRASANLAATKMSECVLGQSKRVDFC
GKGYHLMSFPQSAPHGVVFLHVTYVPAQEKNFTTAPAICHDGKAHFPREGVFVSNGTHWFVTQRNFYEPQIITTDNTF
VSGNCDVVIGIVNNTVYDPLQPELDSFKEELDKYFKNHTSPDVDLGDISGINASVVNIQKEIDRLNEVAKNLNESLIDLQE
LGKYEQGSGYIPEAPRDGQAYVRKDGEWVLLSTFLGRSLEVLFQGPGSLPETGGGSDYKDDDDKGGGGSGGGGSGGG
GSGGGGSGGGGSHHHHHH
SEQ ID NO 93: SEQ ID NO 2 + D614N + T572I + N532P + S884C + A893C
MFVFLVLLPLVSSQCVNLTTRTQLPPAYTNSFTRGVYYPDKVFRSSVLHSTQDLFLPFFSNVTWFHAIHVSGTNGTKRFD
NPVLPFNDGVYFASTEKSNIIRGWIFGTTLDSKTQSLLIVNNATNVVIKVCEFQFCNDPFLGVYYHKNNKSWMESEFRVY
SSANNCTFEYVSQPFLMDLEGKQGNFKNLREFVFKNIDGYFKIYSKHTPINLVRDLPQGFSALEPLVDLPIGINITRFQTLL
ALHRSYLTPGDSSSGWTAGAAAYYVGYLQPRTFLLKYNENGTITDAVDCALDPLSETKCTLKSFTVEKGIYQTSNFRVQP
TESIVRFPNITNLCPFGEVFNATRFASVYAWNRKRISNCVADYSVLYNSASFSTFKCYGVSPTKLNDLCFTNVYADSFVIR
GDEVRQIAPGQTGKIADYNYKLPDDFTGCVIAWNSNNLDSKVGGNYNYLYRLFRKSNLKPFERDISTEIYQAGSTPCNG
VEGFNCYFPLQSYGFQPTNGVGYQPYRVVVLSFELLHAPATVCGPKKSTPLVKNKCVNFNFNGLTGTGVLTESNKKFLP
FQQFGRDIADITDAVRDPQTLEILDITPCSFGGVSVITPGTNTSNQVAVLYQNVNCTEVPVAIHADQLTPTWRVYSTGS
NVFQTRAGCLIGAEHVNNSYECDIPIGAGICASYQTQTNSPSRAGSVASQSIIAYTMSLGAENSVAYSNNSIAIPTNFTISV
TTEILPVSMTKTSVDCTMYICGDSTECSNLLLQYGSFCTQLNRALTGIAVEQDKNTQEVFAQVKQIYKTPPIKDFGGFNFS
QILPDPSKPSKRSFIEDLLFNKVTLADAGFIKQYGDCLGDIAARDLICAQKFNGLTVLPPLLTDEMIAQYTSALLAGTITCG
WTFGAGACLQIPFAMQMAYRFNGIGVTQNVLYENQKLIANQFNSAIGKIQDSLSSTASALGKLQDVVNQNAQALNTL
VKQLSSNFGAISSVLNDILSRLDKVEAEVQIDRLITGRLQSLQTYVTQQLIRAAEIRASANLAATKMSECVLGQSKRVDFC
GKGYHLMSFPQSAPHGVVFLHVTYVPAQEKNFTTAPAICHDGKAHFPREGVFVSNGTHWFVTQRNFYEPQIITTDNTF
VSGNCDVVIGIVNNTVYDPLQPELDSFKEELDKYFKNHTSPDVDLGDISGINASVVNIQKEIDRLNEVAKNLNESLIDLQE
LGKYEQGSGYIPEAPRDGQAYVRKDGEWVLLSTFLGRSLEVLFQGPGSLPETGGGSDYKDDDDKGGGGSGGGGSGGG
GSGGGGSGGGGSHHHHHH
SEQ ID NO 94: SEQ ID NO 2 + A942P + A892P + D614N + T572I + N532P
MFVFLVLLPLVSSQCVNLTTRTQLPPAYTNSFTRGVYYPDKVFRSSVLHSTQDLFLPFFSNVTWFHAIHVSGTNGTKRFD
NPVLPFNDGVYFASTEKSNIIRGWIFGTTLDSKTQSLLIVNNATNVVIKVCEFQFCNDPFLGVYYHKNNKSWMESEFRVY
SSANNCTFEYVSQPFLMDLEGKQGNFKNLREFVFKNIDGYFKIYSKHTPINLVRDLPQGFSALEPLVDLPIGINITRFQTLL
ALHRSYLTPGDSSSGWTAGAAAYYVGYLQPRTFLLKYNENGTITDAVDCALDPLSETKCTLKSFTVEKGIYQTSNFRVQP
TESIVRFPNITNLCPFGEVFNATRFASVYAWNRKRISNCVADYSVLYNSASFSTFKCYGVSPTKLNDLCFTNVYADSFVIR
GDEVRQIAPGQTGKIADYNYKLPDDFTGCVIAWNSNNLDSKVGGNYNYLYRLFRKSNLKPFERDISTEIYQAGSTPCNG
VEGFNCYFPLQSYGFQPTNGVGYQPYRVVVLSFELLHAPATVCGPKKSTPLVKNKCVNFNFNGLTGTGVLTESNKKFLP
FQQFGRDIADITDAVRDPQTLEILDITPCSFGGVSVITPGTNTSNQVAVLYQNVNCTEVPVAIHADQLTPTWRVYSTGS
NVFQTRAGCLIGAEHVNNSYECDIPIGAGICASYQTQTNSPSRAGSVASQSIIAYTMSLGAENSVAYSNNSIAIPTNFTISV
TTEILPVSMTKTSVDCTMYICGDSTECSNLLLQYGSFCTQLNRALTGIAVEQDKNTQEVFAQVKQIYKTPPIKDFGGFNFS
QILPDPSKPSKRSFIEDLLFNKVTLADAGFIKQYGDCLGDIAARDLICAQKFNGLTVLPPLLTDEMIAQYTSALLAGTITSG
WTFGAGPALQIPFAMQMAYRFNGIGVTQNVLYENQKLIANQFNSAIGKIQDSLSSTPSALGKLQDVVNQNAQALNTL
VKQLSSNFGAISSVLNDILSRLDKVEAEVQIDRLITGRLQSLQTYVTQQLIRAAEIRASANLAATKMSECVLGQSKRVDFC
GKGYHLMSFPQSAPHGVVFLHVTYVPAQEKNFTTAPAICHDGKAHFPREGVFVSNGTHWFVTQRNFYEPQIITTDNTF
VSGNCDVVIGIVNNTVYDPLQPELDSFKEELDKYFKNHTSPDVDLGDISGINASVVNIQKEIDRLNEVAKNLNESLIDLQE
LGKYEQGSGYIPEAPRDGQAYVRKDGEWVLLSTFLGRSLEVLFQGPGSLPETGGGSDYKDDDDKGGGGSGGGGSGGG
GSGGGGSGGGGSHHHHHH
SEQ ID NO 95: SEQ ID NO 2 + A942P + A892P + D614N + T572I + G880C + F888C
MFVFLVLLPLVSSQCVNLTTRTQLPPAYTNSFTRGVYYPDKVFRSSVLHSTQDLFLPFFSNVTWFHAIHVSGTNGTKRFD
NPVLPFNDGVYFASTEKSNIIRGWIFGTTLDSKTQSLLIVNNATNVVIKVCEFQFCNDPFLGVYYHKNNKSWMESEFRVY
SSANNCTFEYVSQPFLMDLEGKQGNFKNLREFVFKNIDGYFKIYSKHTPINLVRDLPQGFSALEPLVDLPIGINITRFQTLL
ALHRSYLTPGDSSSGWTAGAAAYYVGYLQPRTFLLKYNENGTITDAVDCALDPLSETKCTLKSFTVEKGIYQTSNFRVQP
TESIVRFPNITNLCPFGEVFNATRFASVYAWNRKRISNCVADYSVLYNSASFSTFKCYGVSPTKLNDLCFTNVYADSFVIR
GDEVRQIAPGQTGKIADYNYKLPDDFTGCVIAWNSNNLDSKVGGNYNYLYRLFRKSNLKPFERDISTEIYQAGSTPCNG
VEGFNCYFPLQSYGFQPTNGVGYQPYRVVVLSFELLHAPATVCGPKKSTNLVKNKCVNFNFNGLTGTGVLTESNKKFLP
FQQFGRDIADITDAVRDPQTLEILDITPCSFGGVSVITPGTNTSNQVAVLYQNVNCTEVPVAIHADQLTPTWRVYSTGS
NVFQTRAGCLIGAEHVNNSYECDIPIGAGICASYQTQTNSPSRAGSVASQSIIAYTMSLGAENSVAYSNNSIAIPTNFTISV
TTEILPVSMTKTSVDCTMYICGDSTECSNLLLQYGSFCTQLNRALTGIAVEQDKNTQEVFAQVKQIYKTPPIKDFGGFNFS
QILPDPSKPSKRSFIEDLLFNKVTLADAGFIKQYGDCLGDIAARDLICAQKFNGLTVLPPLLTDEMIAQYTSALLACTITSG
WTCGAGPALQIPFAMQMAYRFNGIGVTQNVLYENQKLIANQFNSAIGKIQDSLSSTPSALGKLQDVVNQNAQALNTL
VKQLSSNFGAISSVLNDILSRLDKVEAEVQIDRLITGRLQSLQTYVTQQLIRAAEIRASANLAATKMSECVLGQSKRVDFC
GKGYHLMSFPQSAPHGVVFLHVTYVPAQEKNFTTAPAICHDGKAHFPREGVFVSNGTHWFVTQRNFYEPQIITTDNTF
VSGNCDVVIGIVNNTVYDPLQPELDSFKEELDKYFKNHTSPDVDLGDISGINASVVNIQKEIDRLNEVAKNLNESLIDLQE
LGKYEQGSGYIPEAPRDGQAYVRKDGEWVLLSTFLGRSLEVLFQGPGSLPETGGGSDYKDDDDKGGGGSGGGGSGGG
GSGGGGSGGGGSHHHHHH
SEQ ID NO 96: SEQ ID NO 2 + A942P + A892P + D614N + T572I + S884C + A893C
MFVFLVLLPLVSSQCVNLTTRTQLPPAYTNSFTRGVYYPDKVFRSSVLHSTQDLFLPFFSNVTWFHAIHVSGTNGTKRFD
NPVLPFNDGVYFASTEKSNIIRGWIFGTTLDSKTQSLLIVNNATNVVIKVCEFQFCNDPFLGVYYHKNNKSWMESEFRVY
SSANNCTFEYVSQPFLMDLEGKQGNFKNLREFVFKNIDGYFKIYSKHTPINLVRDLPQGFSALEPLVDLPIGINITRFQTLL
ALHRSYLTPGDSSSGWTAGAAAYYVGYLQPRTFLLKYNENGTITDAVDCALDPLSETKCTLKSFTVEKGIYQTSNFRVQP
TESIVRFPNITNLCPFGEVFNATRFASVYAWNRKRISNCVADYSVLYNSASFSTFKCYGVSPTKLNDLCFTNVYADSFVIR
GDEVRQIAPGQTGKIADYNYKLPDDFTGCVIAWNSNNLDSKVGGNYNYLYRLFRKSNLKPFERDISTEIYQAGSTPCNG
VEGFNCYFPLQSYGFQPTNGVGYQPYRVVVLSFELLHAPATVCGPKKSTNLVKNKCVNFNFNGLTGTGVLTESNKKFLP
FQQFGRDIADITDAVRDPQTLEILDITPCSFGGVSVITPGTNTSNQVAVLYQNVNCTEVPVAIHADQLTPTWRVYSTGS
NVFQTRAGCLIGAEHVNNSYECDIPIGAGICASYQTQTNSPSRAGSVASQSIIAYTMSLGAENSVAYSNNSIAIPTNFTISV
TTEILPVSMTKTSVDCTMYICGDSTECSNLLLQYGSFCTQLNRALTGIAVEQDKNTQEVFAQVKQIYKTPPIKDFGGFNFS
QILPDPSKPSKRSFIEDLLFNKVTLADAGFIKQYGDCLGDIAARDLICAQKFNGLTVLPPLLTDEMIAQYTSALLAGTITCG
WTFGAGPCLQIPFAMQMAYRFNGIGVTQNVLYENQKLIANQFNSAIGKIQDSLSSTPSALGKLQDVVNQNAQALNTL
VKQLSSNFGAISSVLNDILSRLDKVEAEVQIDRLITGRLQSLQTYVTQQLIRAAEIRASANLAATKMSECVLGQSKRVDFC
GKGYHLMSFPQSAPHGVVFLHVTYVPAQEKNFTTAPAICHDGKAHFPREGVFVSNGTHWFVTQRNFYEPQIITTDNTF
VSGNCDVVIGIVNNTVYDPLQPELDSFKEELDKYFKNHTSPDVDLGDISGINASVVNIQKEIDRLNEVAKNLNESLIDLQE
LGKYEQGSGYIPEAPRDGQAYVRKDGEWVLLSTFLGRSLEVLFQGPGSLPETGGGSDYKDDDDKGGGGSGGGGSGGG
GSGGGGSGGGGSHHHHHH
SEQ ID NO 97: SEQ ID NO 2 + A942P + A892P + D614N + N532P + G880C + F888C
MFVFLVLLPLVSSQCVNLTTRTQLPPAYTNSFTRGVYYPDKVFRSSVLHSTQDLFLPFFSNVTWFHAIHVSGTNGTKRFD
NPVLPFNDGVYFASTEKSNIIRGWIFGTTLDSKTQSLLIVNNATNVVIKVCEFQFCNDPFLGVYYHKNNKSWMESEFRVY
SSANNCTFEYVSQPFLMDLEGKQGNFKNLREFVFKNIDGYFKIYSKHTPINLVRDLPQGFSALEPLVDLPIGINITRFQTLL
ALHRSYLTPGDSSSGWTAGAAAYYVGYLQPRTFLLKYNENGTITDAVDCALDPLSETKCTLKSFTVEKGIYQTSNFRVQP
TESIVRFPNITNLCPFGEVFNATRFASVYAWNRKRISNCVADYSVLYNSASFSTFKCYGVSPTKLNDLCFTNVYADSFVIR
GDEVRQIAPGQTGKIADYNYKLPDDFTGCVIAWNSNNLDSKVGGNYNYLYRLFRKSNLKPFERDISTEIYQAGSTPCNG
VEGFNCYFPLQSYGFQPTNGVGYQPYRVVVLSFELLHAPATVCGPKKSTPLVKNKCVNFNFNGLTGTGVLTESNKKFLP
FQQFGRDIADTTDAVRDPQTLEILDITPCSFGGVSVITPGTNTSNQVAVLYQNVNCTEVPVAIHADQLTPTWRVYSTGS
NVFQTRAGCLIGAEHVNNSYECDIPIGAGICASYQTQTNSPSRAGSVASQSIIAYTMSLGAENSVAYSNNSIAIPTNFTISV
TTEILPVSMTKTSVDCTMYICGDSTECSNLLLQYGSFCTQLNRALTGIAVEQDKNTQEVFAQVKQIYKTPPIKDFGGFNFS
QILPDPSKPSKRSFIEDLLFNKVTLADAGFIKQYGDCLGDIAARDLICAQKFNGLTVLPPLLTDEMIAQYTSALLACTITSG
WTCGAGPALQIPFAMQMAYRFNGIGVTQNVLYENQKLIANQFNSAIGKIQDSLSSTPSALGKLQDVVNQNAQALNTL
VKQLSSNFGAISSVLNDILSRLDKVEAEVQIDRLITGRLQSLQTYVTQQLIRAAEIRASANLAATKMSECVLGQSKRVDFC
GKGYHLMSFPQSAPHGVVFLHVTYVPAQEKNFTTAPAICHDGKAHFPREGVFVSNGTHWFVTQRNFYEPQIITTDNTF
VSGNCDVVIGIVNNTVYDPLQPELDSFKEELDKYFKNHTSPDVDLGDISGINASVVNIQKEIDRLNEVAKNLNESLIDLQE
LGKYEQGSGYIPEAPRDGQAYVRKDGEWVLLSTFLGRSLEVLFQGPGSLPETGGGSDYKDDDDKGGGGSGGGGSGGG
GSGGGGSGGGGSHHHHHH
SEQ ID NO 98: SEQ ID NO 2 + A942P + A892P + D614N + N532P + S884C + A893C
MFVFLVLLPLVSSQCVNLTTRTQLPPAYTNSFTRGVYYPDKVFRSSVLHSTQDLFLPFFSNVTWFHAIHVSGTNGTKRFD
NPVLPFNDGVYFASTEKSNIIRGWIFGTTLDSKTQSLLIVNNATNVVIKVCEFQFCNDPFLGVYYHKNNKSWMESEFRVY
SSANNCTFEYVSQPFLMDLEGKQGNFKNLREFVFKNIDGYFKIYSKHTPINLVRDLPQGFSALEPLVDLPIGINITRFQTLL
ALHRSYLTPGDSSSGWTAGAAAYYVGYLQPRTFLLKYNENGTITDAVDCALDPLSETKCTLKSFTVEKGIYQTSNFRVQP
TESIVRFPNITNLCPFGEVFNATRFASVYAWNRKRISNCVADYSVLYNSASFSTFKCYGVSPTKLNDLCFTNVYADSFVIR
GDEVRQIAPGQTGKIADYNYKLPDDFTGCVIAWNSNNLDSKVGGNYNYLYRLFRKSNLKPFERDISTEIYQAGSTPCNG
VEGFNCYFPLQSYGFQPTNGVGYQPYRVVVLSFELLHAPATVCGPKKSTPLVKNKCVNFNFNGLTGTGVLTESNKKFLP
FQQFGRDIADTTDAVRDPQTLEILDITPCSFGGVSVITPGTNTSNQVAVLYQNVNCTEVPVAIHADQLTPTWRVYSTGS
NVFQTRAGCLIGAEHVNNSYECDIPIGAGICASYQTQTNSPSRAGSVASQSIIAYTMSLGAENSVAYSNNSIAIPTNFTISV
TTEILPVSMTKTSVDCTMYICGDSTECSNLLLQYGSFCTQLNRALTGIAVEQDKNTQEVFAQVKQIYKTPPIKDFGGFNFS
QILPDPSKPSKRSFIEDLLFNKVTLADAGFIKQYGDCLGDIAARDLICAQKFNGLTVLPPLLTDEMIAQYTSALLAGTITCG
WTFGAGPCLQIPFAMQMAYRFNGIGVTQNVLYENQKLIANQFNSAIGKIQDSLSSTPSALGKLQDVVNQNAQALNTL
VKQLSSNFGAISSVLNDILSRLDKVEAEVQIDRLITGRLQSLQTYVTQQLIRAAEIRASANLAATKMSECVLGQSKRVDFC
GKGYHLMSFPQSAPHGVVFLHVTYVPAQEKNFTTAPAICHDGKAHFPREGVFVSNGTHWFVTQRNFYEPQIITTDNTF
VSGNCDVVIGIVNNTVYDPLQPELDSFKEELDKYFKNHTSPDVDLGDISGINASVVNIQKEIDRLNEVAKNLNESLIDLQE
LGKYEQGSGYIPEAPRDGQAYVRKDGEWVLLSTFLGRSLEVLFQGPGSLPETGGGSDYKDDDDKGGGGSGGGGSGGG
GSGGGGSGGGGSHHHHHH
SEQ ID NO 99: SEQ ID NO 2 + A942P + A892P + T572I + N532P + G880C + F888C
MFVFLVLLPLVSSQCVNLTTRTQLPPAYTNSFTRGVYYPDKVFRSSVLHSTQDLFLPFFSNVTWFHAIHVSGTNGTKRFD
NPVLPFNDGVYFASTEKSNIIRGWIFGTTLDSKTQSLLIVNNATNVVIKVCEFQFCNDPFLGVYYHKNNKSWMESEFRVY
SSANNCTFEYVSQPFLMDLEGKQGNFKNLREFVFKNIDGYFKIYSKHTPINLVRDLPQGFSALEPLVDLPIGINITRFQTLL
ALHRSYLTPGDSSSGWTAGAAAYYVGYLQPRTFLLKYNENGTITDAVDCALDPLSETKCTLKSFTVEKGIYQTSNFRVQP
TESIVRFPNITNLCPFGEVFNATRFASVYAWNRKRISNCVADYSVLYNSASFSTFKCYGVSPTKLNDLCFTNVYADSFVIR
GDEVRQIAPGQTGKIADYNYKLPDDFTGCVIAWNSNNLDSKVGGNYNYLYRLFRKSNLKPFERDISTEIYQAGSTPCNG
VEGFNCYFPLQSYGFQPTNGVGYQPYRVVVLSFELLHAPATVCGPKKSTPLVKNKCVNFNFNGLTGTGVLTESNKKFLP
FQQFGRDIADITDAVRDPQTLEILDITPCSFGGVSVITPGTNTSNQVAVLYQDVNCTEVPVAIHADQLTPTWRVYSTGS
NVFQTRAGCLIGAEHVNNSYECDIPIGAGICASYQTQTNSPSRAGSVASQSIIAYTMSLGAENSVAYSNNSIAIPTNFTISV
TTEILPVSMTKTSVDCTMYICGDSTECSNLLLQYGSFCTQLNRALTGIAVEQDKNTQEVFAQVKQIYKTPPIKDFGGFNFS
QILPDPSKPSKRSFIEDLLFNKVTLADAGFIKQYGDCLGDIAARDLICAQKFNGLTVLPPLLTDEMIAQYTSALLACTITSG
WTCGAGPALQIPFAMQMAYRFNGIGVTQNVLYENQKLIANQFNSAIGKIQDSLSSTPSALGKLQDVVNQNAQALNTL
VKQLSSNFGAISSVLNDILSRLDKVEAEVQIDRLITGRLQSLQTYVTQQLIRAAEIRASANLAATKMSECVLGQSKRVDFC
GKGYHLMSFPQSAPHGVVFLHVTYVPAQEKNFTTAPAICHDGKAHFPREGVFVSNGTHWFVTQRNFYEPQIITTDNTF
VSGNCDVVIGIVNNTVYDPLQPELDSFKEELDKYFKNHTSPDVDLGDISGINASVVNIQKEIDRLNEVAKNLNESLIDLQE
LGKYEQGSGYIPEAPRDGQAYVRKDGEWVLLSTFLGRSLEVLFQGPGSLPETGGGSDYKDDDDKGGGGSGGGGSGGG
GSGGGGSGGGGSHHHHHH
SEQ ID NO 100: SEQ ID NO 2 + A942P + A892P + T572I + N532P + S884C + A893C
MFVFLVLLPLVSSQCVNLTTRTQLPPAYTNSFTRGVYYPDKVFRSSVLHSTQDLFLPFFSNVTWFHAIHVSGTNGTKRFD
NPVLPFNDGVYFASTEKSNIIRGWIFGTTLDSKTQSLLIVNNATNVVIKVCEFQFCNDPFLGVYYHKNNKSWMESEFRVY
SSANNCTFEYVSQPFLMDLEGKQGNFKNLREFVFKNIDGYFKIYSKHTPINLVRDLPQGFSALEPLVDLPIGINITRFQTLL
ALHRSYLTPGDSSSGWTAGAAAYYVGYLQPRTFLLKYNENGTITDAVDCALDPLSETKCTLKSFTVEKGIYQTSNFRVQP
TESIVRFPNITNLCPFGEVFNATRFASVYAWNRKRISNCVADYSVLYNSASFSTFKCYGVSPTKLNDLCFTNVYADSFVIR
GDEVRQIAPGQTGKIADYNYKLPDDFTGCVIAWNSNNLDSKVGGNYNYLYRLFRKSNLKPFERDISTEIYQAGSTPCNG
VEGFNCYFPLQSYGFQPTNGVGYQPYRVVVLSFELLHAPATVCGPKKSTPLVKNKCVNFNFNGLTGTGVLTESNKKFLP
FQQFGRDIADITDAVRDPQTLEILDITPCSFGGVSVITPGTNTSNQVAVLYQDVNCTEVPVAIHADQLTPTWRVYSTGS
NVFQTRAGCLIGAEHVNNSYECDIPIGAGICASYQTQTNSPSRAGSVASQSIIAYTMSLGAENSVAYSNNSIAIPTNFTISV
TTEILPVSMTKTSVDCTMYICGDSTECSNLLLQYGSFCTQLNRALTGIAVEQDKNTQEVFAQVKQIYKTPPIKDFGGFNFS
QILPDPSKPSKRSFIEDLLFNKVTLADAGFIKQYGDCLGDIAARDLICAQKFNGLTVLPPLLTDEMIAQYTSALLAGTITCG
WTFGAGPCLQIPFAMQMAYRFNGIGVTQNVLYENQKLIANQFNSAIGKIQDSLSSTPSALGKLQDVVNQNAQALNTL
VKQLSSNFGAISSVLNDILSRLDKVEAEVQIDRLITGRLQSLQTYVTQQLIRAAEIRASANLAATKMSECVLGQSKRVDFC
GKGYHLMSFPQSAPHGVVFLHVTYVPAQEKNFTTAPAICHDGKAHFPREGVFVSNGTHWFVTQRNFYEPQIITTDNTF
VSGNCDVVIGIVNNTVYDPLQPELDSFKEELDKYFKNHTSPDVDLGDISGINASVVNIQKEIDRLNEVAKNLNESLIDLQE
LGKYEQGSGYIPEAPRDGQAYVRKDGEWVLLSTFLGRSLEVLFQGPGSLPETGGGSDYKDDDDKGGGGSGGGGSGGG
GSGGGGSGGGGSHHHHHH
SEQ ID NO 101: SEQ ID NO 2 + A942P + D614N + T572I + N532P + G880C + F888C
MFVFLVLLPLVSSQCVNLTTRTQLPPAYTNSFTRGVYYPDKVFRSSVLHSTQDLFLPFFSNVTWFHAIHVSGTNGTKRFD
NPVLPFNDGVYFASTEKSNIIRGWIFGTTLDSKTQSLLIVNNATNVVIKVCEFQFCNDPFLGVYYHKNNKSWMESEFRVY
SSANNCTFEYVSQPFLMDLEGKQGNFKNLREFVFKNIDGYFKIYSKHTPINLVRDLPQGFSALEPLVDLPIGINITRFQTLL
ALHRSYLTPGDSSSGWTAGAAAYYVGYLQPRTFLLKYNENGTITDAVDCALDPLSETKCTLKSFTVEKGIYQTSNFRVQP
TESIVRFPNITNLCPFGEVFNATRFASVYAWNRKRISNCVADYSVLYNSASFSTFKCYGVSPTKLNDLCFTNVYADSFVIR
GDEVRQIAPGQTGKIADYNYKLPDDFTGCVIAWNSNNLDSKVGGNYNYLYRLFRKSNLKPFERDISTEIYQAGSTPCNG
VEGFNCYFPLQSYGFQPTNGVGYQPYRVVVLSFELLHAPATVCGPKKSTPLVKNKCVNFNFNGLTGTGVLTESNKKFLP
FQQFGRDIADITDAVRDPQTLEILDITPCSFGGVSVITPGTNTSNQVAVLYQNVNCTEVPVAIHADQLTPTWRVYSTGS
NVFQTRAGCLIGAEHVNNSYECDIPIGAGICASYQTQTNSPSRAGSVASQSIIAYTMSLGAENSVAYSNNSIAIPTNFTISV
TTEILPVSMTKTSVDCTMYICGDSTECSNLLLQYGSFCTQLNRALTGIAVEQDKNTQEVFAQVKQIYKTPPIKDFGGFNFS
QILPDPSKPSKRSFIEDLLFNKVTLADAGFIKQYGDCLGDIAARDLICAQKFNGLTVLPPLLTDEMIAQYTSALLACTITSG
WTCGAGAALQIPFAMQMAYRFNGIGVTQNVLYENQKLIANQFNSAIGKIQDSLSSTPSALGKLQDVVNQNAQALNTL
VKQLSSNFGAISSVLNDILSRLDKVEAEVQIDRLITGRLQSLQTYVTQQLIRAAEIRASANLAATKMSECVLGQSKRVDFC
GKGYHLMSFPQSAPHGVVFLHVTYVPAQEKNFTTAPAICHDGKAHFPREGVFVSNGTHWFVTQRNFYEPQIITTDNTF
VSGNCDVVIGIVNNTVYDPLQPELDSFKEELDKYFKNHTSPDVDLGDISGINASVVNIQKEIDRLNEVAKNLNESLIDLQE
LGKYEQGSGYIPEAPRDGQAYVRKDGEWVLLSTFLGRSLEVLFQGPGSLPETGGGSDYKDDDDKGGGGSGGGGSGGG
GSGGGGSGGGGSHHHHHH
SEQ ID NO 102: SEQ ID NO 2 + A942P + D614N + T572I + N532P + S884C + A893C
MFVFLVLLPLVSSQCVNLTTRTQLPPAYTNSFTRGVYYPDKVFRSSVLHSTQDLFLPFFSNVTWFHAIHVSGTNGTKRFD
NPVLPFNDGVYFASTEKSNIIRGWIFGTTLDSKTQSLLIVNNATNVVIKVCEFQFCNDPFLGVYYHKNNKSWMESEFRVY
SSANNCTFEYVSQPFLMDLEGKQGNFKNLREFVFKNIDGYFKIYSKHTPINLVRDLPQGFSALEPLVDLPIGINITRFQTLL
ALHRSYLTPGDSSSGWTAGAAAYYVGYLQPRTFLLKYNENGTITDAVDCALDPLSETKCTLKSFTVEKGIYQTSNFRVQP
TESIVRFPNITNLCPFGEVFNATRFASVYAWNRKRISNCVADYSVLYNSASFSTFKCYGVSPTKLNDLCFTNVYADSFVIR
GDEVRQIAPGQTGKIADYNYKLPDDFTGCVIAWNSNNLDSKVGGNYNYLYRLFRKSNLKPFERDISTEIYQAGSTPCNG
VEGFNCYFPLQSYGFQPTNGVGYQPYRVVVLSFELLHAPATVCGPKKSTPLVKNKCVNFNFNGLTGTGVLTESNKKFLP
FQQFGRDIADITDAVRDPQTLEILDITPCSFGGVSVITPGTNTSNQVAVLYQNVNCTEVPVAIHADQLTPTWRVYSTGS
NVFQTRAGCLIGAEHVNNSYECDIPIGAGICASYQTQTNSPSRAGSVASQSIIAYTMSLGAENSVAYSNNSIAIPTNFTISV
TTEILPVSMTKTSVDCTMYICGDSTECSNLLLQYGSFCTQLNRALTGIAVEQDKNTQEVFAQVKQIYKTPPIKDFGGFNFS
QILPDPSKPSKRSFIEDLLFNKVTLADAGFIKQYGDCLGDIAARDLICAQKFNGLTVLPPLLTDEMIAQYTSALLAGTITCG
WTFGAGACLQIPFAMQMAYRFNGIGVTQNVLYENQKLIANQFNSAIGKIQDSLSSTPSALGKLQDVVNQNAQALNTL
VKQLSSNFGAISSVLNDILSRLDKVEAEVQIDRLITGRLQSLQTYVTQQLIRAAEIRASANLAATKMSECVLGQSKRVDFC
GKGYHLMSFPQSAPHGVVFLHVTYVPAQEKNFTTAPAICHDGKAHFPREGVFVSNGTHWFVTQRNFYEPQIITTDNTF
VSGNCDVVIGIVNNTVYDPLQPELDSFKEELDKYFKNHTSPDVDLGDISGINASVVNIQKEIDRLNEVAKNLNESLIDLQE
LGKYEQGSGYIPEAPRDGQAYVRKDGEWVLLSTFLGRSLEVLFQGPGSLPETGGGSDYKDDDDKGGGGSGGGGSGGG
GSGGGGSGGGGSHHHHHH
SEQ ID NO 103: SEQ ID NO 2 + A892P + D614N + T572I + N532P + G880C + F888C
MFVFLVLLPLVSSQCVNLTTRTQLPPAYTNSFTRGVYYPDKVFRSSVLHSTQDLFLPFFSNVTWFHAIHVSGTNGTKRFD
NPVLPFNDGVYFASTEKSNIIRGWIFGTTLDSKTQSLLIVNNATNVVIKVCEFQFCNDPFLGVYYHKNNKSWMESEFRVY
SSANNCTFEYVSQPFLMDLEGKQGNFKNLREFVFKNIDGYFKIYSKHTPINLVRDLPQGFSALEPLVDLPIGINITRFQTLL
ALHRSYLTPGDSSSGWTAGAAAYYVGYLQPRTFLLKYNENGTITDAVDCALDPLSETKCTLKSFTVEKGIYQTSNFRVQP
TESIVRFPNITNLCPFGEVFNATRFASVYAWNRKRISNCVADYSVLYNSASFSTFKCYGVSPTKLNDLCFTNVYADSFVIR
GDEVRQIAPGQTGKIADYNYKLPDDFTGCVIAWNSNNLDSKVGGNYNYLYRLFRKSNLKPFERDISTEIYQAGSTPCNG
VEGFNCYFPLQSYGFQPTNGVGYQPYRVVVLSFELLHAPATVCGPKKSTPLVKNKCVNFNFNGLTGTGVLTESNKKFLP
FQQFGRDIADITDAVRDPQTLEILDITPCSFGGVSVITPGTNTSNQVAVLYQNVNCTEVPVAIHADQLTPTWRVYSTGS
NVFQTRAGCLIGAEHVNNSYECDIPIGAGICASYQTQTNSPSRAGSVASQSIIAYTMSLGAENSVAYSNNSIAIPTNFTISV
TTEILPVSMTKTSVDCTMYICGDSTECSNLLLQYGSFCTQLNRALTGIAVEQDKNTQEVFAQVKQIYKTPPIKDFGGFNFS
QILPDPSKPSKRSFIEDLLFNKVTLADAGFIKQYGDCLGDIAARDLICAQKFNGLTVLPPLLTDEMIAQYTSALLACTITSG
WTCGAGPALQIPFAMQMAYRFNGIGVTQNVLYENQKLIANQFNSAIGKIQDSLSSTASALGKLQDVVNQNAQALNTL
VKQLSSNFGAISSVLNDILSRLDKVEAEVQIDRLITGRLQSLQTYVTQQLIRAAEIRASANLAATKMSECVLGQSKRVDFC
GKGYHLMSFPQSAPHGVVFLHVTYVPAQEKNFTTAPAICHDGKAHFPREGVFVSNGTHWFVTQRNFYEPQIITTDNTF
VSGNCDVVIGIVNNTVYDPLQPELDSFKEELDKYFKNHTSPDVDLGDISGINASVVNIQKEIDRLNEVAKNLNESLIDLQE
LGKYEQGSGYIPEAPRDGQAYVRKDGEWVLLSTFLGRSLEVLFQGPGSLPETGGGSDYKDDDDKGGGGSGGGGSGGG
GSGGGGSGGGGSHHHHHH
SEQ ID NO 104: SEQ ID NO 2 + A892P + D614N + T572I + N532P + S884C + A893C
MFVFLVLLPLVSSQCVNLTTRTQLPPAYTNSFTRGVYYPDKVFRSSVLHSTQDLFLPFFSNVTWFHAIHVSGTNGTKRFD
NPVLPFNDGVYFASTEKSNIIRGWIFGTTLDSKTQSLLIVNNATNVVIKVCEFQFCNDPFLGVYYHKNNKSWMESEFRVY
SSANNCTFEYVSQPFLMDLEGKQGNFKNLREFVFKNIDGYFKIYSKHTPINLVRDLPQGFSALEPLVDLPIGINITRFQTLL
ALHRSYLTPGDSSSGWTAGAAAYYVGYLQPRTFLLKYNENGTITDAVDCALDPLSETKCTLKSFTVEKGIYQTSNFRVQP
TESIVRFPNITNLCPFGEVFNATRFASVYAWNRKRISNCVADYSVLYNSASFSTFKCYGVSPTKLNDLCFTNVYADSFVIR
GDEVRQIAPGQTGKIADYNYKLPDDFTGCVIAWNSNNLDSKVGGNYNYLYRLFRKSNLKPFERDISTEIYQAGSTPCNG
VEGFNCYFPLQSYGFQPTNGVGYQPYRVVVLSFELLHAPATVCGPKKSTPLVKNKCVNFNFNGLTGTGVLTESNKKFLP
FQQFGRDIADITDAVRDPQTLEILDITPCSFGGVSVITPGTNTSNQVAVLYQNVNCTEVPVAIHADQLTPTWRVYSTGS
NVFQTRAGCLIGAEHVNNSYECDIPIGAGICASYQTQTNSPSRAGSVASQSIIAYTMSLGAENSVAYSNNSIAIPTNFTISV
TTEILPVSMTKTSVDCTMYICGDSTECSNLLLQYGSFCTQLNRALTGIAVEQDKNTQEVFAQVKQIYKTPPIKDFGGFNFS
QILPDPSKPSKRSFIEDLLFNKVTLADAGFIKQYGDCLGDIAARDLICAQKFNGLTVLPPLLTDEMIAQYTSALLAGTITCG
WTFGAGPCLQIPFAMQMAYRFNGIGVTQNVLYENQKLIANQFNSAIGKIQDSLSSTASALGKLQDVVNQNAQALNTL
VKQLSSNFGAISSVLNDILSRLDKVEAEVQIDRLITGRLQSLQTYVTQQLIRAAEIRASANLAATKMSECVLGQSKRVDFC
GKGYHLMSFPQSAPHGVVFLHVTYVPAQEKNFTTAPAICHDGKAHFPREGVFVSNGTHWFVTQRNFYEPQIITTDNTF
VSGNCDVVIGIVNNTVYDPLQPELDSFKEELDKYFKNHTSPDVDLGDISGINASVVNIQKEIDRLNEVAKNLNESLIDLQE
LGKYEQGSGYIPEAPRDGQAYVRKDGEWVLLSTFLGRSLEVLFQGPGSLPETGGGSDYKDDDDKGGGGSGGGGSGGG
GSGGGGSGGGGSHHHHHH
SEQ ID NO 105: SEQ ID NO 2 + A942P + A892P + D614N + T572I + N532P + G880C + F888C
MFVFLVLLPLVSSQCVNLTTRTQLPPAYTNSFTRGVYYPDKVFRSSVLHSTQDLFLPFFSNVTWFHAIHVSGTNGTKRFD
NPVLPFNDGVYFASTEKSNIIRGWIFGTTLDSKTQSLLIVNNATNVVIKVCEFQFCNDPFLGVYYHKNNKSWMESEFRVY
SSANNCTFEYVSQPFLMDLEGKQGNFKNLREFVFKNIDGYFKIYSKHTPINLVRDLPQGFSALEPLVDLPIGINITRFQTLL
ALHRSYLTPGDSSSGWTAGAAAYYVGYLQPRTFLLKYNENGTITDAVDCALDPLSETKCTLKSFTVEKGIYQTSNFRVQP
TESIVRFPNITNLCPFGEVFNATRFASVYAWNRKRISNCVADYSVLYNSASFSTFKCYGVSPTKLNDLCFTNVYADSFVIR
GDEVRQIAPGQTGKIADYNYKLPDDFTGCVIAWNSNNLDSKVGGNYNYLYRLFRKSNLKPFERDISTEIYQAGSTPCNG
VEGFNCYFPLQSYGFQPTNGVGYQPYRVVVLSFELLHAPATVCGPKKSTPLVKNKCVNFNFNGLTGTGVLTESNKKFLP
FQQFGRDIADITDAVRDPQTLEILDITPCSFGGVSVITPGTNTSNQVAVLYQNVNCTEVPVAIHADQLTPTWRVYSTGS
NVFQTRAGCLIGAEHVNNSYECDIPIGAGICASYQTQTNSPSRAGSVASQSIIAYTMSLGAENSVAYSNNSIAIPTNFTISV
TTEILPVSMTKTSVDCTMYICGDSTECSNLLLQYGSFCTQLNRALTGIAVEQDKNTQEVFAQVKQIYKTPPIKDFGGFNFS
QILPDPSKPSKRSFIEDLLFNKVTLADAGFIKQYGDCLGDIAARDLICAQKFNGLTVLPPLLTDEMIAQYTSALLACTITSG
WTCGAGPALQIPFAMQMAYRFNGIGVTQNVLYENQKLIANQFNSAIGKIQDSLSSTPSALGKLQDVVNQNAQALNTL
VKQLSSNFGAISSVLNDILSRLDKVEAEVQIDRLITGRLQSLQTYVTQQLIRAAEIRASANLAATKMSECVLGQSKRVDFC
GKGYHLMSFPQSAPHGVVFLHVTYVPAQEKNFTTAPAICHDGKAHFPREGVFVSNGTHWFVTQRNFYEPQIITTDNTF
VSGNCDVVIGIVNNTVYDPLQPELDSFKEELDKYFKNHTSPDVDLGDISGINASVVNIQKEIDRLNEVAKNLNESLIDLQE
LGKYEQGSGYIPEAPRDGQAYVRKDGEWVLLSTFLGRSLEVLFQGPGSLPETGGGSDYKDDDDKGGGGSGGGGSGGG
GSGGGGSGGGGSHHHHHH
SEQ ID NO 106: SEQ ID NO 2 + A942P + A892P + D614N + T572I + N532P + S884C + A893C
MFVFLVLLPLVSSQCVNLTTRTQLPPAYTNSFTRGVYYPDKVFRSSVLHSTQDLFLPFFSNVTWFHAIHVSGTNGTKRFD
NPVLPFNDGVYFASTEKSNIIRGWIFGTTLDSKTQSLLIVNNATNVVIKVCEFQFCNDPFLGVYYHKNNKSWMESEFRVY
SSANNCTFEYVSQPFLMDLEGKQGNFKNLREFVFKNIDGYFKIYSKHTPINLVRDLPQGFSALEPLVDLPIGINITRFQTLL
ALHRSYLTPGDSSSGWTAGAAAYYVGYLQPRTFLLKYNENGTITDAVDCALDPLSETKCTLKSFTVEKGIYQTSNFRVQP
TESIVRFPNITNLCPFGEVFNATRFASVYAWNRKRISNCVADYSVLYNSASFSTFKCYGVSPTKLNDLCFTNVYADSFVIR
GDEVRQIAPGQTGKIADYNYKLPDDFTGCVIAWNSNNLDSKVGGNYNYLYRLFRKSNLKPFERDISTEIYQAGSTPCNG
VEGFNCYFPLQSYGFQPTNGVGYQPYRVVVLSFELLHAPATVCGPKKSTPLVKNKCVNFNFNGLTGTGVLTESNKKFLP
FQQFGRDIADITDAVRDPQTLEILDITPCSFGGVSVITPGTNTSNQVAVLYQNVNCTEVPVAIHADQLTPTWRVYSTGS
NVFQTRAGCLIGAEHVNNSYECDIPIGAGICASYQTQTNSPSRAGSVASQSIIAYTMSLGAENSVAYSNNSIAIPTNFTISV
TTEILPVSMTKTSVDCTMYICGDSTECSNLLLQYGSFCTQLNRALTGIAVEQDKNTQEVFAQVKQIYKTPPIKDFGGFNFS
QILPDPSKPSKRSFIEDLLFNKVTLADAGFIKQYGDCLGDIAARDLICAQKFNGLTVLPPLLTDEMIAQYTSALLAGTITCG
WTFGAGPCLQIPFAMQMAYRFNGIGVTQNVLYENQKLIANQFNSAIGKIQDSLSSTPSALGKLQDVVNQNAQALNTL
VKQLSSNFGAISSVLNDILSRLDKVEAEVQIDRLITGRLQSLQTYVTQQLIRAAEIRASANLAATKMSECVLGQSKRVDFC
GKGYHLMSFPQSAPHGVVFLHVTYVPAQEKNFTTAPAICHDGKAHFPREGVFVSNGTHWFVTQRNFYEPQIITTDNTF
VSGNCDVVIGIVNNTVYDPLQPELDSFKEELDKYFKNHTSPDVDLGDISGINASVVNIQKEIDRLNEVAKNLNESLIDLQE
LGKYEQGSGYIPEAPRDGQAYVRKDGEWVLLSTFLGRSLEVLFQGPGSLPETGGGSDYKDDDDKGGGGSGGGGSGGG
GSGGGGSGGGGSHHHHHH
SEQ ID NO 107: SEQ ID NO 3 + A942P + A892P
MFVFLVLLPLVSSQCVNLTTRTQLPPAYTNSFTRGVYYPDKVFRSSVLHSTQDLFLPFFSNVTWFHAIHVSGTNGTKRFD
NPVLPFNDGVYFASTEKSNIIRGWIFGTTLDSKTQSLLIVNNATNVVIKVCEFQFCNDPFLGVYYHKNNKSWMESEFRVY
SSANNCTFEYVSQPFLMDLEGKQGNFKNLREFVFKNIDGYFKIYSKHTPINLVRDLPQGFSALEPLVDLPIGINITRFQTLL
ALHRSYLTPGDSSSGWTAGAAAYYVGYLQPRTFLLKYNENGTITDAVDCALDPLSETKCTLKSFTVEKGIYQTSNFRVQP
TESIVRFPNITNLCPFGEVFNATRFASVYAWNRKRISNCVADYSVLYNSASFSTFKCYGVSPTKLNDLCFTNVYADSFVIR
GDEVRQIAPGQTGKIADYNYKLPDDFTGCVIAWNSNNLDSKVGGNYNYLYRLFRKSNLKPFERDISTEIYQAGSTPCNG
VEGFNCYFPLQSYGFQPTNGVGYQPYRVVVLSFELLHAPATVCGPKKSTNLVKNKCVNFNFNGLTGTGVLTESNKKFLP
FQQFGRDIADTTDAVRDPQTLEILDITPCSFGGVSVITPGTNTSNQVAVLYQDVNCTEVPVAIHADQLTPTWRVYSTGS
NVFQTRAGCLIGAEHVNNSYECDIPIGAGICASYQTQTNSPSRAGSVASQSIIAYTMSLGAENSVAYSNNSIAIPTNFTISV
TTEILPVSMTKTSVDCTMYICGDSTECSNLLLQYGSFCTQLNRALTGIAVEQDKNTQEVFAQVKQIYKTPPIKDFGGFNFS
QILPDPSKPSKRSFIEDLLFNKVTLADAGFIKQYGDCLGDIAARDLICAQKFNGLTVLPPLLTDEMIAQYTSALLAGTITSG
WTFGAGPALQIPFAMQMAYRFNGIGVTQNVLYENQKLIANQFNSAIGKIQDSLSSTPSALGKLQDVVNQNAQALNTL
VKQLSSNFGAISSVLNDILSRLDPPEAEVQIDRLITGRLQSLQTYVTQQLIRAAEIRASANLAATKMSECVLGQSKRVDFC
GKGYHLMSFPQSAPHGVVFLHVTYVPAQEKNFTTAPAICHDGKAHFPREGVFVSNGTHWFVTQRNFYEPQIITTDNTF
VSGNCDVVIGIVNNTVYDPLQPELDSFKEELDKYFKNHTSPDVDLGDISGINASVVNIQKEIDRLNEVAKNLNESLIDLQE
LGKYEQGSGYIPEAPRDGQAYVRKDGEWVLLSTFLGRSLEVLFQGPGSLPETGGGSDYKDDDDKGGGGSGGGGSGGG
GSGGGGSGGGGSHHHHHH
SEQ ID NO 108: SEQ ID NO 3 + A942P + D614N
MFVFLVLLPLVSSQCVNLTTRTQLPPAYTNSFTRGVYYPDKVFRSSVLHSTQDLFLPFFSNVTWFHAIHVSGTNGTKRFD
NPVLPFNDGVYFASTEKSNIIRGWIFGTTLDSKTQSLLIVNNATNVVIKVCEFQFCNDPFLGVYYHKNNKSWMESEFRVY
SSANNCTFEYVSQPFLMDLEGKQGNFKNLREFVFKNIDGYFKIYSKHTPINLVRDLPQGFSALEPLVDLPIGINITRFQTLL
ALHRSYLTPGDSSSGWTAGAAAYYVGYLQPRTFLLKYNENGTITDAVDCALDPLSETKCTLKSFTVEKGIYQTSNFRVQP
TESIVRFPNITNLCPFGEVFNATRFASVYAWNRKRISNCVADYSVLYNSASFSTFKCYGVSPTKLNDLCFTNVYADSFVIR
GDEVRQIAPGQTGKIADYNYKLPDDFTGCVIAWNSNNLDSKVGGNYNYLYRLFRKSNLKPFERDISTEIYQAGSTPCNG
VEGFNCYFPLQSYGFQPTNGVGYQPYRVVVLSFELLHAPATVCGPKKSTNLVKNKCVNFNFNGLTGTGVLTESNKKFLP
FQQFGRDIADTTDAVRDPQTLEILDITPCSFGGVSVITPGTNTSNQVAVLYQNVNCTEVPVAIHADQLTPTWRVYSTGS
NVFQTRAGCLIGAEHVNNSYECDIPIGAGICASYQTQTNSPSRAGSVASQSIIAYTMSLGAENSVAYSNNSIAIPTNFTISV
TTEILPVSMTKTSVDCTMYICGDSTECSNLLLQYGSFCTQLNRALTGIAVEQDKNTQEVFAQVKQIYKTPPIKDFGGFNFS
QILPDPSKPSKRSFIEDLLFNKVTLADAGFIKQYGDCLGDIAARDLICAQKFNGLTVLPPLLTDEMIAQYTSALLAGTITSG
WTFGAGAALQIPFAMQMAYRFNGIGVTQNVLYENQKLIANQFNSAIGKIQDSLSSTPSALGKLQDVVNQNAQALNTL
VKQLSSNFGAISSVLNDILSRLDPPEAEVQIDRLITGRLQSLQTYVTQQLIRAAEIRASANLAATKMSECVLGQSKRVDFC
GKGYHLMSFPQSAPHGVVFLHVTYVPAQEKNFTTAPAICHDGKAHFPREGVFVSNGTHWFVTQRNFYEPQIITTDNTF
VSGNCDVVIGIVNNTVYDPLQPELDSFKEELDKYFKNHTSPDVDLGDISGINASVVNIQKEIDRLNEVAKNLNESLIDLQE
LGKYEQGSGYIPEAPRDGQAYVRKDGEWVLLSTFLGRSLEVLFQGPGSLPETGGGSDYKDDDDKGGGGSGGGGSGGG
GSGGGGSGGGGSHHHHHH
SEQ ID NO 109: SEQ ID NO 3 + A942P + T572I
MFVFLVLLPLVSSQCVNLTTRTQLPPAYTNSFTRGVYYPDKVFRSSVLHSTQDLFLPFFSNVTWFHAIHVSGTNGTKRFD
NPVLPFNDGVYFASTEKSNIIRGWIFGTTLDSKTQSLLIVNNATNVVIKVCEFQFCNDPFLGVYYHKNNKSWMESEFRVY
SSANNCTFEYVSQPFLMDLEGKQGNFKNLREFVFKNIDGYFKIYSKHTPINLVRDLPQGFSALEPLVDLPIGINITRFQTLL
ALHRSYLTPGDSSSGWTAGAAAYYVGYLQPRTFLLKYNENGTITDAVDCALDPLSETKCTLKSFTVEKGIYQTSNFRVQP
TESIVRFPNITNLCPFGEVFNATRFASVYAWNRKRISNCVADYSVLYNSASFSTFKCYGVSPTKLNDLCFTNVYADSFVIR
GDEVRQIAPGQTGKIADYNYKLPDDFTGCVIAWNSNNLDSKVGGNYNYLYRLFRKSNLKPFERDISTEIYQAGSTPCNG
VEGFNCYFPLQSYGFQPTNGVGYQPYRVVVLSFELLHAPATVCGPKKSTNLVKNKCVNFNFNGLTGTGVLTESNKKFLP
FQQFGRDIADITDAVRDPQTLEILDITPCSFGGVSVITPGTNTSNQVAVLYQDVNCTEVPVAIHADQLTPTWRVYSTGS
NVFQTRAGCLIGAEHVNNSYECDIPIGAGICASYQTQTNSPSRAGSVASQSIIAYTMSLGAENSVAYSNNSIAIPTNFTISV
TTEILPVSMTKTSVDCTMYICGDSTECSNLLLQYGSFCTQLNRALTGIAVEQDKNTQEVFAQVKQIYKTPPIKDFGGFNFS
QILPDPSKPSKRSFIEDLLFNKVTLADAGFIKQYGDCLGDIAARDLICAQKFNGLTVLPPLLTDEMIAQYTSALLAGTITSG
WTFGAGAALQIPFAMQMAYRFNGIGVTQNVLYENQKLIANQFNSAIGKIQDSLSSTPSALGKLQDVVNQNAQALNTL
VKQLSSNFGAISSVLNDILSRLDPPEAEVQIDRLITGRLQSLQTYVTQQLIRAAEIRASANLAATKMSECVLGQSKRVDFC
GKGYHLMSFPQSAPHGVVFLHVTYVPAQEKNFTTAPAICHDGKAHFPREGVFVSNGTHWFVTQRNFYEPQIITTDNTF
VSGNCDVVIGIVNNTVYDPLQPELDSFKEELDKYFKNHTSPDVDLGDISGINASVVNIQKEIDRLNEVAKNLNESLIDLQE
LGKYEQGSGYIPEAPRDGQAYVRKDGEWVLLSTFLGRSLEVLFQGPGSLPETGGGSDYKDDDDKGGGGSGGGGSGGG
GSGGGGSGGGGSHHHHHH
SEQ ID NO 110: SEQ ID NO 3 + A942P + N532P
MFVFLVLLPLVSSQCVNLTTRTQLPPAYTNSFTRGVYYPDKVFRSSVLHSTQDLFLPFFSNVTWFHAIHVSGTNGTKRFD
NPVLPFNDGVYFASTEKSNIIRGWIFGTTLDSKTQSLLIVNNATNVVIKVCEFQFCNDPFLGVYYHKNNKSWMESEFRVY
SSANNCTFEYVSQPFLMDLEGKQGNFKNLREFVFKNIDGYFKIYSKHTPINLVRDLPQGFSALEPLVDLPIGINITRFQTLL
ALHRSYLTPGDSSSGWTAGAAAYYVGYLQPRTFLLKYNENGTITDAVDCALDPLSETKCTLKSFTVEKGIYQTSNFRVQP
TESIVRFPNITNLCPFGEVFNATRFASVYAWNRKRISNCVADYSVLYNSASFSTFKCYGVSPTKLNDLCFTNVYADSFVIR
GDEVRQIAPGQTGKIADYNYKLPDDFTGCVIAWNSNNLDSKVGGNYNYLYRLFRKSNLKPFERDISTEIYQAGSTPCNG
VEGFNCYFPLQSYGFQPTNGVGYQPYRVVVLSFELLHAPATVCGPKKSTPLVKNKCVNFNFNGLTGTGVLTESNKKFLP
FQQFGRDIADTTDAVRDPQTLEILDITPCSFGGVSVITPGTNTSNQVAVLYQDVNCTEVPVAIHADQLTPTWRVYSTGS
NVFQTRAGCLIGAEHVNNSYECDIPIGAGICASYQTQTNSPSRAGSVASQSIIAYTMSLGAENSVAYSNNSIAIPTNFTISV
TTEILPVSMTKTSVDCTMYICGDSTECSNLLLQYGSFCTQLNRALTGIAVEQDKNTQEVFAQVKQIYKTPPIKDFGGFNFS
QILPDPSKPSKRSFIEDLLFNKVTLADAGFIKQYGDCLGDIAARDLICAQKFNGLTVLPPLLTDEMIAQYTSALLAGTITSG
WTFGAGAALQIPFAMQMAYRFNGIGVTQNVLYENQKLIANQFNSAIGKIQDSLSSTPSALGKLQDVVNQNAQALNTL
VKQLSSNFGAISSVLNDILSRLDPPEAEVQIDRLITGRLQSLQTYVTQQLIRAAEIRASANLAATKMSECVLGQSKRVDFC
GKGYHLMSFPQSAPHGVVFLHVTYVPAQEKNFTTAPAICHDGKAHFPREGVFVSNGTHWFVTQRNFYEPQIITTDNTF
VSGNCDVVIGIVNNTVYDPLQPELDSFKEELDKYFKNHTSPDVDLGDISGINASVVNIQKEIDRLNEVAKNLNESLIDLQE
LGKYEQGSGYIPEAPRDGQAYVRKDGEWVLLSTFLGRSLEVLFQGPGSLPETGGGSDYKDDDDKGGGGSGGGGSGGG
GSGGGGSGGGGSHHHHHH
SEQ ID NO 111: SEQ ID NO 3 + A942P + G880C + F888C
MFVFLVLLPLVSSQCVNLTTRTQLPPAYTNSFTRGVYYPDKVFRSSVLHSTQDLFLPFFSNVTWFHAIHVSGTNGTKRFD
NPVLPFNDGVYFASTEKSNIIRGWIFGTTLDSKTQSLLIVNNATNVVIKVCEFQFCNDPFLGVYYHKNNKSWMESEFRVY
SSANNCTFEYVSQPFLMDLEGKQGNFKNLREFVFKNIDGYFKIYSKHTPINLVRDLPQGFSALEPLVDLPIGINITRFQTLL
ALHRSYLTPGDSSSGWTAGAAAYYVGYLQPRTFLLKYNENGTITDAVDCALDPLSETKCTLKSFTVEKGIYQTSNFRVQP
TESIVRFPNITNLCPFGEVFNATRFASVYAWNRKRISNCVADYSVLYNSASFSTFKCYGVSPTKLNDLCFTNVYADSFVIR
GDEVRQIAPGQTGKIADYNYKLPDDFTGCVIAWNSNNLDSKVGGNYNYLYRLFRKSNLKPFERDISTEIYQAGSTPCNG
VEGFNCYFPLQSYGFQPTNGVGYQPYRVVVLSFELLHAPATVCGPKKSTNLVKNKCVNFNFNGLTGTGVLTESNKKFLP
FQQFGRDIADTTDAVRDPQTLEILDITPCSFGGVSVITPGTNTSNQVAVLYQDVNCTEVPVAIHADQLTPTWRVYSTGS
NVFQTRAGCLIGAEHVNNSYECDIPIGAGICASYQTQTNSPSRAGSVASQSIIAYTMSLGAENSVAYSNNSIAIPTNFTISV
TTEILPVSMTKTSVDCTMYICGDSTECSNLLLQYGSFCTQLNRALTGIAVEQDKNTQEVFAQVKQIYKTPPIKDFGGFNFS
QILPDPSKPSKRSFIEDLLFNKVTLADAGFIKQYGDCLGDIAARDLICAQKFNGLTVLPPLLTDEMIAQYTSALLACTITSG
WTCGAGAALQIPFAMQMAYRFNGIGVTQNVLYENQKLIANQFNSAIGKIQDSLSSTPSALGKLQDVVNQNAQALNTL
VKQLSSNFGAISSVLNDILSRLDPPEAEVQIDRLITGRLQSLQTYVTQQLIRAAEIRASANLAATKMSECVLGQSKRVDFC
GKGYHLMSFPQSAPHGVVFLHVTYVPAQEKNFTTAPAICHDGKAHFPREGVFVSNGTHWFVTQRNFYEPQIITTDNTF
VSGNCDVVIGIVNNTVYDPLQPELDSFKEELDKYFKNHTSPDVDLGDISGINASVVNIQKEIDRLNEVAKNLNESLIDLQE
LGKYEQGSGYIPEAPRDGQAYVRKDGEWVLLSTFLGRSLEVLFQGPGSLPETGGGSDYKDDDDKGGGGSGGGGSGGG
GSGGGGSGGGGSHHHHHH
SEQ ID NO 112: SEQ ID NO 3 + A942P + S884C + A893C
MFVFLVLLPLVSSQCVNLTTRTQLPPAYTNSFTRGVYYPDKVFRSSVLHSTQDLFLPFFSNVTWFHAIHVSGTNGTKRFD
NPVLPFNDGVYFASTEKSNIIRGWIFGTTLDSKTQSLLIVNNATNVVIKVCEFQFCNDPFLGVYYHKNNKSWMESEFRVY
SSANNCTFEYVSQPFLMDLEGKQGNFKNLREFVFKNIDGYFKIYSKHTPINLVRDLPQGFSALEPLVDLPIGINITRFQTLL
ALHRSYLTPGDSSSGWTAGAAAYYVGYLQPRTFLLKYNENGTITDAVDCALDPLSETKCTLKSFTVEKGIYQTSNFRVQP
TESIVRFPNITNLCPFGEVFNATRFASVYAWNRKRISNCVADYSVLYNSASFSTFKCYGVSPTKLNDLCFTNVYADSFVIR
GDEVRQIAPGQTGKIADYNYKLPDDFTGCVIAWNSNNLDSKVGGNYNYLYRLFRKSNLKPFERDISTEIYQAGSTPCNG
VEGFNCYFPLQSYGFQPTNGVGYQPYRVVVLSFELLHAPATVCGPKKSTNLVKNKCVNFNFNGLTGTGVLTESNKKFLP
FQQFGRDIADTTDAVRDPQTLEILDITPCSFGGVSVITPGTNTSNQVAVLYQDVNCTEVPVAIHADQLTPTWRVYSTGS
NVFQTRAGCLIGAEHVNNSYECDIPIGAGICASYQTQTNSPSRAGSVASQSIIAYTMSLGAENSVAYSNNSIAIPTNFTISV
TTEILPVSMTKTSVDCTMYICGDSTECSNLLLQYGSFCTQLNRALTGIAVEQDKNTQEVFAQVKQIYKTPPIKDFGGFNFS
QILPDPSKPSKRSFIEDLLFNKVTLADAGFIKQYGDCLGDIAARDLICAQKFNGLTVLPPLLTDEMIAQYTSALLAGTITCG
WTFGAGACLQIPFAMQMAYRFNGIGVTQNVLYENQKLIANQFNSAIGKIQDSLSSTPSALGKLQDVVNQNAQALNTL
VKQLSSNFGAISSVLNDILSRLDPPEAEVQIDRLITGRLQSLQTYVTQQLIRAAEIRASANLAATKMSECVLGQSKRVDFC
GKGYHLMSFPQSAPHGVVFLHVTYVPAQEKNFTTAPAICHDGKAHFPREGVFVSNGTHWFVTQRNFYEPQIITTDNTF
VSGNCDVVIGIVNNTVYDPLQPELDSFKEELDKYFKNHTSPDVDLGDISGINASVVNIQKEIDRLNEVAKNLNESLIDLQE
LGKYEQGSGYIPEAPRDGQAYVRKDGEWVLLSTFLGRSLEVLFQGPGSLPETGGGSDYKDDDDKGGGGSGGGGSGGG
GSGGGGSGGGGSHHHHHH
SEQ ID NO 113: SEQ ID NO 3 + A892P + D614N
MFVFLVLLPLVSSQCVNLTTRTQLPPAYTNSFTRGVYYPDKVFRSSVLHSTQDLFLPFFSNVTWFHAIHVSGTNGTKRFD
NPVLPFNDGVYFASTEKSNIIRGWIFGTTLDSKTQSLLIVNNATNVVIKVCEFQFCNDPFLGVYYHKNNKSWMESEFRVY
SSANNCTFEYVSQPFLMDLEGKQGNFKNLREFVFKNIDGYFKIYSKHTPINLVRDLPQGFSALEPLVDLPIGINITRFQTLL
ALHRSYLTPGDSSSGWTAGAAAYYVGYLQPRTFLLKYNENGTITDAVDCALDPLSETKCTLKSFTVEKGIYQTSNFRVQP
TESIVRFPNITNLCPFGEVFNATRFASVYAWNRKRISNCVADYSVLYNSASFSTFKCYGVSPTKLNDLCFTNVYADSFVIR
GDEVRQIAPGQTGKIADYNYKLPDDFTGCVIAWNSNNLDSKVGGNYNYLYRLFRKSNLKPFERDISTEIYQAGSTPCNG
VEGFNCYFPLQSYGFQPTNGVGYQPYRVVVLSFELLHAPATVCGPKKSTNLVKNKCVNFNFNGLTGTGVLTESNKKFLP
FQQFGRDIADTTDAVRDPQTLEILDITPCSFGGVSVITPGTNTSNQVAVLYQNVNCTEVPVAIHADQLTPTWRVYSTGS
NVFQTRAGCLIGAEHVNNSYECDIPIGAGICASYQTQTNSPSRAGSVASQSIIAYTMSLGAENSVAYSNNSIAIPTNFTISV
TTEILPVSMTKTSVDCTMYICGDSTECSNLLLQYGSFCTQLNRALTGIAVEQDKNTQEVFAQVKQIYKTPPIKDFGGFNFS
QILPDPSKPSKRSFIEDLLFNKVTLADAGFIKQYGDCLGDIAARDLICAQKFNGLTVLPPLLTDEMIAQYTSALLAGTITSG
WTFGAGPALQIPFAMQMAYRFNGIGVTQNVLYENQKLIANQFNSAIGKIQDSLSSTASALGKLQDVVNQNAQALNTL
VKQLSSNFGAISSVLNDILSRLDPPEAEVQIDRLITGRLQSLQTYVTQQLIRAAEIRASANLAATKMSECVLGQSKRVDFC
GKGYHLMSFPQSAPHGVVFLHVTYVPAQEKNFTTAPAICHDGKAHFPREGVFVSNGTHWFVTQRNFYEPQIITTDNTF
VSGNCDVVIGIVNNTVYDPLQPELDSFKEELDKYFKNHTSPDVDLGDISGINASVVNIQKEIDRLNEVAKNLNESLIDLQE
LGKYEQGSGYIPEAPRDGQAYVRKDGEWVLLSTFLGRSLEVLFQGPGSLPETGGGSDYKDDDDKGGGGSGGGGSGGG
GSGGGGSGGGGSHHHHHH
SEQ ID NO 114: SEQ ID NO 3 + A892P + T572I
MFVFLVLLPLVSSQCVNLTTRTQLPPAYTNSFTRGVYYPDKVFRSSVLHSTQDLFLPFFSNVTWFHAIHVSGTNGTKRFD
NPVLPFNDGVYFASTEKSNIIRGWIFGTTLDSKTQSLLIVNNATNVVIKVCEFQFCNDPFLGVYYHKNNKSWMESEFRVY
SSANNCTFEYVSQPFLMDLEGKQGNFKNLREFVFKNIDGYFKIYSKHTPINLVRDLPQGFSALEPLVDLPIGINITRFQTLL
ALHRSYLTPGDSSSGWTAGAAAYYVGYLQPRTFLLKYNENGTITDAVDCALDPLSETKCTLKSFTVEKGIYQTSNFRVQP
TESIVRFPNITNLCPFGEVFNATRFASVYAWNRKRISNCVADYSVLYNSASFSTFKCYGVSPTKLNDLCFTNVYADSFVIR
GDEVRQIAPGQTGKIADYNYKLPDDFTGCVIAWNSNNLDSKVGGNYNYLYRLFRKSNLKPFERDISTEIYQAGSTPCNG
VEGFNCYFPLQSYGFQPTNGVGYQPYRVVVLSFELLHAPATVCGPKKSTNLVKNKCVNFNFNGLTGTGVLTESNKKFLP
FQQFGRDIADITDAVRDPQTLEILDITPCSFGGVSVITPGTNTSNQVAVLYQDVNCTEVPVAIHADQLTPTWRVYSTGS
NVFQTRAGCLIGAEHVNNSYECDIPIGAGICASYQTQTNSPSRAGSVASQSIIAYTMSLGAENSVAYSNNSIAIPTNFTISV
TTEILPVSMTKTSVDCTMYICGDSTECSNLLLQYGSFCTQLNRALTGIAVEQDKNTQEVFAQVKQIYKTPPIKDFGGFNFS
QILPDPSKPSKRSFIEDLLFNKVTLADAGFIKQYGDCLGDIAARDLICAQKFNGLTVLPPLLTDEMIAQYTSALLAGTITSG
WTFGAGPALQIPFAMQMAYRFNGIGVTQNVLYENQKLIANQFNSAIGKIQDSLSSTASALGKLQDVVNQNAQALNTL
VKQLSSNFGAISSVLNDILSRLDPPEAEVQIDRLITGRLQSLQTYVTQQLIRAAEIRASANLAATKMSECVLGQSKRVDFC
GKGYHLMSFPQSAPHGVVFLHVTYVPAQEKNFTTAPAICHDGKAHFPREGVFVSNGTHWFVTQRNFYEPQIITTDNTF
VSGNCDVVIGIVNNTVYDPLQPELDSFKEELDKYFKNHTSPDVDLGDISGINASVVNIQKEIDRLNEVAKNLNESLIDLQE
LGKYEQGSGYIPEAPRDGQAYVRKDGEWVLLSTFLGRSLEVLFQGPGSLPETGGGSDYKDDDDKGGGGSGGGGSGGG
GSGGGGSGGGGSHHHHHH
SEQ ID NO 115: SEQ ID NO 3 + A892P + N532P
MFVFLVLLPLVSSQCVNLTTRTQLPPAYTNSFTRGVYYPDKVFRSSVLHSTQDLFLPFFSNVTWFHAIHVSGTNGTKRFD
NPVLPFNDGVYFASTEKSNIIRGWIFGTTLDSKTQSLLIVNNATNVVIKVCEFQFCNDPFLGVYYHKNNKSWMESEFRVY
SSANNCTFEYVSQPFLMDLEGKQGNFKNLREFVFKNIDGYFKIYSKHTPINLVRDLPQGFSALEPLVDLPIGINITRFQTLL
ALHRSYLTPGDSSSGWTAGAAAYYVGYLQPRTFLLKYNENGTITDAVDCALDPLSETKCTLKSFTVEKGIYQTSNFRVQP
TESIVRFPNITNLCPFGEVFNATRFASVYAWNRKRISNCVADYSVLYNSASFSTFKCYGVSPTKLNDLCFTNVYADSFVIR
GDEVRQIAPGQTGKIADYNYKLPDDFTGCVIAWNSNNLDSKVGGNYNYLYRLFRKSNLKPFERDISTEIYQAGSTPCNG
VEGFNCYFPLQSYGFQPTNGVGYQPYRVVVLSFELLHAPATVCGPKKSTPLVKNKCVNFNFNGLTGTGVLTESNKKFLP
FQQFGRDIADTTDAVRDPQTLEILDITPCSFGGVSVITPGTNTSNQVAVLYQDVNCTEVPVAIHADQLTPTWRVYSTGS
NVFQTRAGCLIGAEHVNNSYECDIPIGAGICASYQTQTNSPSRAGSVASQSIIAYTMSLGAENSVAYSNNSIAIPTNFTISV
TTEILPVSMTKTSVDCTMYICGDSTECSNLLLQYGSFCTQLNRALTGIAVEQDKNTQEVFAQVKQIYKTPPIKDFGGFNFS
QILPDPSKPSKRSFIEDLLFNKVTLADAGFIKQYGDCLGDIAARDLICAQKFNGLTVLPPLLTDEMIAQYTSALLAGTITSG
WTFGAGPALQIPFAMQMAYRFNGIGVTQNVLYENQKLIANQFNSAIGKIQDSLSSTASALGKLQDVVNQNAQALNTL
VKQLSSNFGAISSVLNDILSRLDPPEAEVQIDRLITGRLQSLQTYVTQQLIRAAEIRASANLAATKMSECVLGQSKRVDFC
GKGYHLMSFPQSAPHGVVFLHVTYVPAQEKNFTTAPAICHDGKAHFPREGVFVSNGTHWFVTQRNFYEPQIITTDNTF
VSGNCDVVIGIVNNTVYDPLQPELDSFKEELDKYFKNHTSPDVDLGDISGINASVVNIQKEIDRLNEVAKNLNESLIDLQE
LGKYEQGSGYIPEAPRDGQAYVRKDGEWVLLSTFLGRSLEVLFQGPGSLPETGGGSDYKDDDDKGGGGSGGGGSGGG
GSGGGGSGGGGSHHHHHH
SEQ ID NO 116: SEQ ID NO 3 + A892P + G880C + F888C
MFVFLVLLPLVSSQCVNLTTRTQLPPAYTNSFTRGVYYPDKVFRSSVLHSTQDLFLPFFSNVTWFHAIHVSGTNGTKRFD
NPVLPFNDGVYFASTEKSNIIRGWIFGTTLDSKTQSLLIVNNATNVVIKVCEFQFCNDPFLGVYYHKNNKSWMESEFRVY
SSANNCTFEYVSQPFLMDLEGKQGNFKNLREFVFKNIDGYFKIYSKHTPINLVRDLPQGFSALEPLVDLPIGINITRFQTLL
ALHRSYLTPGDSSSGWTAGAAAYYVGYLQPRTFLLKYNENGTITDAVDCALDPLSETKCTLKSFTVEKGIYQTSNFRVQP
TESIVRFPNITNLCPFGEVFNATRFASVYAWNRKRISNCVADYSVLYNSASFSTFKCYGVSPTKLNDLCFTNVYADSFVIR
GDEVRQIAPGQTGKIADYNYKLPDDFTGCVIAWNSNNLDSKVGGNYNYLYRLFRKSNLKPFERDISTEIYQAGSTPCNG
VEGFNCYFPLQSYGFQPTNGVGYQPYRVVVLSFELLHAPATVCGPKKSTNLVKNKCVNFNFNGLTGTGVLTESNKKFLP
FQQFGRDIADTTDAVRDPQTLEILDITPCSFGGVSVITPGTNTSNQVAVLYQDVNCTEVPVAIHADQLTPTWRVYSTGS
NVFQTRAGCLIGAEHVNNSYECDIPIGAGICASYQTQTNSPSRAGSVASQSIIAYTMSLGAENSVAYSNNSIAIPTNFTISV
TTEILPVSMTKTSVDCTMYICGDSTECSNLLLQYGSFCTQLNRALTGIAVEQDKNTQEVFAQVKQIYKTPPIKDFGGFNFS
QILPDPSKPSKRSFIEDLLFNKVTLADAGFIKQYGDCLGDIAARDLICAQKFNGLTVLPPLLTDEMIAQYTSALLACTITSG
WTCGAGPALQIPFAMQMAYRFNGIGVTQNVLYENQKLIANQFNSAIGKIQDSLSSTASALGKLQDVVNQNAQALNTL
VKQLSSNFGAISSVLNDILSRLDPPEAEVQIDRLITGRLQSLQTYVTQQLIRAAEIRASANLAATKMSECVLGQSKRVDFC
GKGYHLMSFPQSAPHGVVFLHVTYVPAQEKNFTTAPAICHDGKAHFPREGVFVSNGTHWFVTQRNFYEPQIITTDNTF
VSGNCDVVIGIVNNTVYDPLQPELDSFKEELDKYFKNHTSPDVDLGDISGINASVVNIQKEIDRLNEVAKNLNESLIDLQE
LGKYEQGSGYIPEAPRDGQAYVRKDGEWVLLSTFLGRSLEVLFQGPGSLPETGGGSDYKDDDDKGGGGSGGGGSGGG
GSGGGGSGGGGSHHHHHH
SEQ ID NO 117: SEQ ID NO 3 + A892P + S884C + A893C
MFVFLVLLPLVSSQCVNLTTRTQLPPAYTNSFTRGVYYPDKVFRSSVLHSTQDLFLPFFSNVTWFHAIHVSGTNGTKRFD
NPVLPFNDGVYFASTEKSNIIRGWIFGTTLDSKTQSLLIVNNATNVVIKVCEFQFCNDPFLGVYYHKNNKSWMESEFRVY
SSANNCTFEYVSQPFLMDLEGKQGNFKNLREFVFKNIDGYFKIYSKHTPINLVRDLPQGFSALEPLVDLPIGINITRFQTLL
ALHRSYLTPGDSSSGWTAGAAAYYVGYLQPRTFLLKYNENGTITDAVDCALDPLSETKCTLKSFTVEKGIYQTSNFRVQP
TESIVRFPNITNLCPFGEVFNATRFASVYAWNRKRISNCVADYSVLYNSASFSTFKCYGVSPTKLNDLCFTNVYADSFVIR
GDEVRQIAPGQTGKIADYNYKLPDDFTGCVIAWNSNNLDSKVGGNYNYLYRLFRKSNLKPFERDISTEIYQAGSTPCNG
VEGFNCYFPLQSYGFQPTNGVGYQPYRVVVLSFELLHAPATVCGPKKSTNLVKNKCVNFNFNGLTGTGVLTESNKKFLP
FQQFGRDIADTTDAVRDPQTLEILDITPCSFGGVSVITPGTNTSNQVAVLYQDVNCTEVPVAIHADQLTPTWRVYSTGS
NVFQTRAGCLIGAEHVNNSYECDIPIGAGICASYQTQTNSPSRAGSVASQSIIAYTMSLGAENSVAYSNNSIAIPTNFTISV
TTEILPVSMTKTSVDCTMYICGDSTECSNLLLQYGSFCTQLNRALTGIAVEQDKNTQEVFAQVKQIYKTPPIKDFGGFNFS
QILPDPSKPSKRSFIEDLLFNKVTLADAGFIKQYGDCLGDIAARDLICAQKFNGLTVLPPLLTDEMIAQYTSALLAGTITCG
WTFGAGPCLQIPFAMQMAYRFNGIGVTQNVLYENQKLIANQFNSAIGKIQDSLSSTASALGKLQDVVNQNAQALNTL
VKQLSSNFGAISSVLNDILSRLDPPEAEVQIDRLITGRLQSLQTYVTQQLIRAAEIRASANLAATKMSECVLGQSKRVDFC
GKGYHLMSFPQSAPHGVVFLHVTYVPAQEKNFTTAPAICHDGKAHFPREGVFVSNGTHWFVTQRNFYEPQIITTDNTF
VSGNCDVVIGIVNNTVYDPLQPELDSFKEELDKYFKNHTSPDVDLGDISGINASVVNIQKEIDRLNEVAKNLNESLIDLQE
LGKYEQGSGYIPEAPRDGQAYVRKDGEWVLLSTFLGRSLEVLFQGPGSLPETGGGSDYKDDDDKGGGGSGGGGSGGG
GSGGGGSGGGGSHHHHHH
SEQ ID NO 118: SEQ ID NO 3 + D614N + T572I
MFVFLVLLPLVSSQCVNLTTRTQLPPAYTNSFTRGVYYPDKVFRSSVLHSTQDLFLPFFSNVTWFHAIHVSGTNGTKRFD
NPVLPFNDGVYFASTEKSNIIRGWIFGTTLDSKTQSLLIVNNATNVVIKVCEFQFCNDPFLGVYYHKNNKSWMESEFRVY
SSANNCTFEYVSQPFLMDLEGKQGNFKNLREFVFKNIDGYFKIYSKHTPINLVRDLPQGFSALEPLVDLPIGINITRFQTLL
ALHRSYLTPGDSSSGWTAGAAAYYVGYLQPRTFLLKYNENGTITDAVDCALDPLSETKCTLKSFTVEKGIYQTSNFRVQP
TESIVRFPNITNLCPFGEVFNATRFASVYAWNRKRISNCVADYSVLYNSASFSTFKCYGVSPTKLNDLCFTNVYADSFVIR
GDEVRQIAPGQTGKIADYNYKLPDDFTGCVIAWNSNNLDSKVGGNYNYLYRLFRKSNLKPFERDISTEIYQAGSTPCNG
VEGFNCYFPLQSYGFQPTNGVGYQPYRVVVLSFELLHAPATVCGPKKSTNLVKNKCVNFNFNGLTGTGVLTESNKKFLP
FQQFGRDIADITDAVRDPQTLEILDITPCSFGGVSVITPGTNTSNQVAVLYQNVNCTEVPVAIHADQLTPTWRVYSTGS
NVFQTRAGCLIGAEHVNNSYECDIPIGAGICASYQTQTNSPSRAGSVASQSIIAYTMSLGAENSVAYSNNSIAIPTNFTISV
TTEILPVSMTKTSVDCTMYICGDSTECSNLLLQYGSFCTQLNRALTGIAVEQDKNTQEVFAQVKQIYKTPPIKDFGGFNFS
QILPDPSKPSKRSFIEDLLFNKVTLADAGFIKQYGDCLGDIAARDLICAQKFNGLTVLPPLLTDEMIAQYTSALLAGTITSG
WTFGAGAALQIPFAMQMAYRFNGIGVTQNVLYENQKLIANQFNSAIGKIQDSLSSTASALGKLQDVVNQNAQALNTL
VKQLSSNFGAISSVLNDILSRLDPPEAEVQIDRLITGRLQSLQTYVTQQLIRAAEIRASANLAATKMSECVLGQSKRVDFC
GKGYHLMSFPQSAPHGVVFLHVTYVPAQEKNFTTAPAICHDGKAHFPREGVFVSNGTHWFVTQRNFYEPQIITTDNTF
VSGNCDVVIGIVNNTVYDPLQPELDSFKEELDKYFKNHTSPDVDLGDISGINASVVNIQKEIDRLNEVAKNLNESLIDLQE
LGKYEQGSGYIPEAPRDGQAYVRKDGEWVLLSTFLGRSLEVLFQGPGSLPETGGGSDYKDDDDKGGGGSGGGGSGGG
GSGGGGSGGGGSHHHHHH
SEQ ID NO 119: SEQ ID NO 3 + D614N + N532P
MFVFLVLLPLVSSQCVNLTTRTQLPPAYTNSFTRGVYYPDKVFRSSVLHSTQDLFLPFFSNVTWFHAIHVSGTNGTKRFD
NPVLPFNDGVYFASTEKSNIIRGWIFGTTLDSKTQSLLIVNNATNVVIKVCEFQFCNDPFLGVYYHKNNKSWMESEFRVY
SSANNCTFEYVSQPFLMDLEGKQGNFKNLREFVFKNIDGYFKIYSKHTPINLVRDLPQGFSALEPLVDLPIGINITRFQTLL
ALHRSYLTPGDSSSGWTAGAAAYYVGYLQPRTFLLKYNENGTITDAVDCALDPLSETKCTLKSFTVEKGIYQTSNFRVQP
TESIVRFPNITNLCPFGEVFNATRFASVYAWNRKRISNCVADYSVLYNSASFSTFKCYGVSPTKLNDLCFTNVYADSFVIR
GDEVRQIAPGQTGKIADYNYKLPDDFTGCVIAWNSNNLDSKVGGNYNYLYRLFRKSNLKPFERDISTEIYQAGSTPCNG
VEGFNCYFPLQSYGFQPTNGVGYQPYRVVVLSFELLHAPATVCGPKKSTPLVKNKCVNFNFNGLTGTGVLTESNKKFLP
FQQFGRDIADTTDAVRDPQTLEILDITPCSFGGVSVITPGTNTSNQVAVLYQNVNCTEVPVAIHADQLTPTWRVYSTGS
NVFQTRAGCLIGAEHVNNSYECDIPIGAGICASYQTQTNSPSRAGSVASQSIIAYTMSLGAENSVAYSNNSIAIPTNFTISV
TTEILPVSMTKTSVDCTMYICGDSTECSNLLLQYGSFCTQLNRALTGIAVEQDKNTQEVFAQVKQIYKTPPIKDFGGFNFS
QILPDPSKPSKRSFIEDLLFNKVTLADAGFIKQYGDCLGDIAARDLICAQKFNGLTVLPPLLTDEMIAQYTSALLAGTITSG
WTFGAGAALQIPFAMQMAYRFNGIGVTQNVLYENQKLIANQFNSAIGKIQDSLSSTASALGKLQDVVNQNAQALNTL
VKQLSSNFGAISSVLNDILSRLDPPEAEVQIDRLITGRLQSLQTYVTQQLIRAAEIRASANLAATKMSECVLGQSKRVDFC
GKGYHLMSFPQSAPHGVVFLHVTYVPAQEKNFTTAPAICHDGKAHFPREGVFVSNGTHWFVTQRNFYEPQIITTDNTF
VSGNCDVVIGIVNNTVYDPLQPELDSFKEELDKYFKNHTSPDVDLGDISGINASVVNIQKEIDRLNEVAKNLNESLIDLQE
LGKYEQGSGYIPEAPRDGQAYVRKDGEWVLLSTFLGRSLEVLFQGPGSLPETGGGSDYKDDDDKGGGGSGGGGSGGG
GSGGGGSGGGGSHHHHHH
SEQ ID NO 120: SEQ ID NO 3 + D614N + G880C + F888C
MFVFLVLLPLVSSQCVNLTTRTQLPPAYTNSFTRGVYYPDKVFRSSVLHSTQDLFLPFFSNVTWFHAIHVSGTNGTKRFD
NPVLPFNDGVYFASTEKSNIIRGWIFGTTLDSKTQSLLIVNNATNVVIKVCEFQFCNDPFLGVYYHKNNKSWMESEFRVY
SSANNCTFEYVSQPFLMDLEGKQGNFKNLREFVFKNIDGYFKIYSKHTPINLVRDLPQGFSALEPLVDLPIGINITRFQTLL
ALHRSYLTPGDSSSGWTAGAAAYYVGYLQPRTFLLKYNENGTITDAVDCALDPLSETKCTLKSFTVEKGIYQTSNFRVQP
TESIVRFPNITNLCPFGEVFNATRFASVYAWNRKRISNCVADYSVLYNSASFSTFKCYGVSPTKLNDLCFTNVYADSFVIR
GDEVRQIAPGQTGKIADYNYKLPDDFTGCVIAWNSNNLDSKVGGNYNYLYRLFRKSNLKPFERDISTEIYQAGSTPCNG
VEGFNCYFPLQSYGFQPTNGVGYQPYRVVVLSFELLHAPATVCGPKKSTNLVKNKCVNFNFNGLTGTGVLTESNKKFLP
FQQFGRDIADTTDAVRDPQTLEILDITPCSFGGVSVITPGTNTSNQVAVLYQNVNCTEVPVAIHADQLTPTWRVYSTGS
NVFQTRAGCLIGAEHVNNSYECDIPIGAGICASYQTQTNSPSRAGSVASQSIIAYTMSLGAENSVAYSNNSIAIPTNFTISV
TTEILPVSMTKTSVDCTMYICGDSTECSNLLLQYGSFCTQLNRALTGIAVEQDKNTQEVFAQVKQIYKTPPIKDFGGFNFS
QILPDPSKPSKRSFIEDLLFNKVTLADAGFIKQYGDCLGDIAARDLICAQKFNGLTVLPPLLTDEMIAQYTSALLACTITSG
WTCGAGAALQIPFAMQMAYRFNGIGVTQNVLYENQKLIANQFNSAIGKIQDSLSSTASALGKLQDVVNQNAQALNTL
VKQLSSNFGAISSVLNDILSRLDPPEAEVQIDRLITGRLQSLQTYVTQQLIRAAEIRASANLAATKMSECVLGQSKRVDFC
GKGYHLMSFPQSAPHGVVFLHVTYVPAQEKNFTTAPAICHDGKAHFPREGVFVSNGTHWFVTQRNFYEPQIITTDNTF
VSGNCDVVIGIVNNTVYDPLQPELDSFKEELDKYFKNHTSPDVDLGDISGINASVVNIQKEIDRLNEVAKNLNESLIDLQE
LGKYEQGSGYIPEAPRDGQAYVRKDGEWVLLSTFLGRSLEVLFQGPGSLPETGGGSDYKDDDDKGGGGSGGGGSGGG
GSGGGGSGGGGSHHHHHH
SEQ ID NO 121: SEQ ID NO 3 + D614N + S884C + A893C
MFVFLVLLPLVSSQCVNLTTRTQLPPAYTNSFTRGVYYPDKVFRSSVLHSTQDLFLPFFSNVTWFHAIHVSGTNGTKRFD
NPVLPFNDGVYFASTEKSNIIRGWIFGTTLDSKTQSLLIVNNATNVVIKVCEFQFCNDPFLGVYYHKNNKSWMESEFRVY
SSANNCTFEYVSQPFLMDLEGKQGNFKNLREFVFKNIDGYFKIYSKHTPINLVRDLPQGFSALEPLVDLPIGINITRFQTLL
ALHRSYLTPGDSSSGWTAGAAAYYVGYLQPRTFLLKYNENGTITDAVDCALDPLSETKCTLKSFTVEKGIYQTSNFRVQP
TESIVRFPNITNLCPFGEVFNATRFASVYAWNRKRISNCVADYSVLYNSASFSTFKCYGVSPTKLNDLCFTNVYADSFVIR
GDEVRQIAPGQTGKIADYNYKLPDDFTGCVIAWNSNNLDSKVGGNYNYLYRLFRKSNLKPFERDISTEIYQAGSTPCNG
VEGFNCYFPLQSYGFQPTNGVGYQPYRVVVLSFELLHAPATVCGPKKSTNLVKNKCVNFNFNGLTGTGVLTESNKKFLP
FQQFGRDIADTTDAVRDPQTLEILDITPCSFGGVSVITPGTNTSNQVAVLYQNVNCTEVPVAIHADQLTPTWRVYSTGS
NVFQTRAGCLIGAEHVNNSYECDIPIGAGICASYQTQTNSPSRAGSVASQSIIAYTMSLGAENSVAYSNNSIAIPTNFTISV
TTEILPVSMTKTSVDCTMYICGDSTECSNLLLQYGSFCTQLNRALTGIAVEQDKNTQEVFAQVKQIYKTPPIKDFGGFNFS
QILPDPSKPSKRSFIEDLLFNKVTLADAGFIKQYGDCLGDIAARDLICAQKFNGLTVLPPLLTDEMIAQYTSALLAGTITCG
WTFGAGACLQIPFAMQMAYRFNGIGVTQNVLYENQKLIANQFNSAIGKIQDSLSSTASALGKLQDVVNQNAQALNTL
VKQLSSNFGAISSVLNDILSRLDPPEAEVQIDRLITGRLQSLQTYVTQQLIRAAEIRASANLAATKMSECVLGQSKRVDFC
GKGYHLMSFPQSAPHGVVFLHVTYVPAQEKNFTTAPAICHDGKAHFPREGVFVSNGTHWFVTQRNFYEPQIITTDNTF
VSGNCDVVIGIVNNTVYDPLQPELDSFKEELDKYFKNHTSPDVDLGDISGINASVVNIQKEIDRLNEVAKNLNESLIDLQE
LGKYEQGSGYIPEAPRDGQAYVRKDGEWVLLSTFLGRSLEVLFQGPGSLPETGGGSDYKDDDDKGGGGSGGGGSGGG
GSGGGGSGGGGSHHHHHH
SEQ ID NO 122: SEQ ID NO 3 + T572I + N532P
MFVFLVLLPLVSSQCVNLTTRTQLPPAYTNSFTRGVYYPDKVFRSSVLHSTQDLFLPFFSNVTWFHAIHVSGTNGTKRFD
NPVLPFNDGVYFASTEKSNIIRGWIFGTTLDSKTQSLLIVNNATNVVIKVCEFQFCNDPFLGVYYHKNNKSWMESEFRVY
SSANNCTFEYVSQPFLMDLEGKQGNFKNLREFVFKNIDGYFKIYSKHTPINLVRDLPQGFSALEPLVDLPIGINITRFQTLL
ALHRSYLTPGDSSSGWTAGAAAYYVGYLQPRTFLLKYNENGTITDAVDCALDPLSETKCTLKSFTVEKGIYQTSNFRVQP
TESIVRFPNITNLCPFGEVFNATRFASVYAWNRKRISNCVADYSVLYNSASFSTFKCYGVSPTKLNDLCFTNVYADSFVIR
GDEVRQIAPGQTGKIADYNYKLPDDFTGCVIAWNSNNLDSKVGGNYNYLYRLFRKSNLKPFERDISTEIYQAGSTPCNG
VEGFNCYFPLQSYGFQPTNGVGYQPYRVVVLSFELLHAPATVCGPKKSTPLVKNKCVNFNFNGLTGTGVLTESNKKFLP
FQQFGRDIADITDAVRDPQTLEILDITPCSFGGVSVITPGTNTSNQVAVLYQDVNCTEVPVAIHADQLTPTWRVYSTGS
NVFQTRAGCLIGAEHVNNSYECDIPIGAGICASYQTQTNSPSRAGSVASQSIIAYTMSLGAENSVAYSNNSIAIPTNFTISV
TTEILPVSMTKTSVDCTMYICGDSTECSNLLLQYGSFCTQLNRALTGIAVEQDKNTQEVFAQVKQIYKTPPIKDFGGFNFS
QILPDPSKPSKRSFIEDLLFNKVTLADAGFIKQYGDCLGDIAARDLICAQKFNGLTVLPPLLTDEMIAQYTSALLAGTITSG
WTFGAGAALQIPFAMQMAYRFNGIGVTQNVLYENQKLIANQFNSAIGKIQDSLSSTASALGKLQDVVNQNAQALNTL
VKQLSSNFGAISSVLNDILSRLDPPEAEVQIDRLITGRLQSLQTYVTQQLIRAAEIRASANLAATKMSECVLGQSKRVDFC
GKGYHLMSFPQSAPHGVVFLHVTYVPAQEKNFTTAPAICHDGKAHFPREGVFVSNGTHWFVTQRNFYEPQIITTDNTF
VSGNCDVVIGIVNNTVYDPLQPELDSFKEELDKYFKNHTSPDVDLGDISGINASVVNIQKEIDRLNEVAKNLNESLIDLQE
LGKYEQGSGYIPEAPRDGQAYVRKDGEWVLLSTFLGRSLEVLFQGPGSLPETGGGSDYKDDDDKGGGGSGGGGSGGG
GSGGGGSGGGGSHHHHHH
SEQ ID NO 123: SEQ ID NO 3 + T572I + G880C + F888C
MFVFLVLLPLVSSQCVNLTTRTQLPPAYTNSFTRGVYYPDKVFRSSVLHSTQDLFLPFFSNVTWFHAIHVSGTNGTKRFD
NPVLPFNDGVYFASTEKSNIIRGWIFGTTLDSKTQSLLIVNNATNVVIKVCEFQFCNDPFLGVYYHKNNKSWMESEFRVY
SSANNCTFEYVSQPFLMDLEGKQGNFKNLREFVFKNIDGYFKIYSKHTPINLVRDLPQGFSALEPLVDLPIGINITRFQTLL
ALHRSYLTPGDSSSGWTAGAAAYYVGYLQPRTFLLKYNENGTITDAVDCALDPLSETKCTLKSFTVEKGIYQTSNFRVQP
TESIVRFPNITNLCPFGEVFNATRFASVYAWNRKRISNCVADYSVLYNSASFSTFKCYGVSPTKLNDLCFTNVYADSFVIR
GDEVRQIAPGQTGKIADYNYKLPDDFTGCVIAWNSNNLDSKVGGNYNYLYRLFRKSNLKPFERDISTEIYQAGSTPCNG
VEGFNCYFPLQSYGFQPTNGVGYQPYRVVVLSFELLHAPATVCGPKKSTNLVKNKCVNFNFNGLTGTGVLTESNKKFLP
FQQFGRDIADITDAVRDPQTLEILDITPCSFGGVSVITPGTNTSNQVAVLYQDVNCTEVPVAIHADQLTPTWRVYSTGS
NVFQTRAGCLIGAEHVNNSYECDIPIGAGICASYQTQTNSPSRAGSVASQSIIAYTMSLGAENSVAYSNNSIAIPTNFTISV
TTEILPVSMTKTSVDCTMYICGDSTECSNLLLQYGSFCTQLNRALTGIAVEQDKNTQEVFAQVKQIYKTPPIKDFGGFNFS
QILPDPSKPSKRSFIEDLLFNKVTLADAGFIKQYGDCLGDIAARDLICAQKFNGLTVLPPLLTDEMIAQYTSALLACTITSG
WTCGAGAALQIPFAMQMAYRFNGIGVTQNVLYENQKLIANQFNSAIGKIQDSLSSTASALGKLQDVVNQNAQALNTL
VKQLSSNFGAISSVLNDILSRLDPPEAEVQIDRLITGRLQSLQTYVTQQLIRAAEIRASANLAATKMSECVLGQSKRVDFC
GKGYHLMSFPQSAPHGVVFLHVTYVPAQEKNFTTAPAICHDGKAHFPREGVFVSNGTHWFVTQRNFYEPQIITTDNTF
VSGNCDVVIGIVNNTVYDPLQPELDSFKEELDKYFKNHTSPDVDLGDISGINASVVNIQKEIDRLNEVAKNLNESLIDLQE
LGKYEQGSGYIPEAPRDGQAYVRKDGEWVLLSTFLGRSLEVLFQGPGSLPETGGGSDYKDDDDKGGGGSGGGGSGGG
GSGGGGSGGGGSHHHHHH
SEQ ID NO 124: SEQ ID NO 3 + T572I + S884C + A893C
MFVFLVLLPLVSSQCVNLTTRTQLPPAYTNSFTRGVYYPDKVFRSSVLHSTQDLFLPFFSNVTWFHAIHVSGTNGTKRFD
NPVLPFNDGVYFASTEKSNIIRGWIFGTTLDSKTQSLLIVNNATNVVIKVCEFQFCNDPFLGVYYHKNNKSWMESEFRVY
SSANNCTFEYVSQPFLMDLEGKQGNFKNLREFVFKNIDGYFKIYSKHTPINLVRDLPQGFSALEPLVDLPIGINITRFQTLL
ALHRSYLTPGDSSSGWTAGAAAYYVGYLQPRTFLLKYNENGTITDAVDCALDPLSETKCTLKSFTVEKGIYQTSNFRVQP
TESIVRFPNITNLCPFGEVFNATRFASVYAWNRKRISNCVADYSVLYNSASFSTFKCYGVSPTKLNDLCFTNVYADSFVIR
GDEVRQIAPGQTGKIADYNYKLPDDFTGCVIAWNSNNLDSKVGGNYNYLYRLFRKSNLKPFERDISTEIYQAGSTPCNG
VEGFNCYFPLQSYGFQPTNGVGYQPYRVVVLSFELLHAPATVCGPKKSTNLVKNKCVNFNFNGLTGTGVLTESNKKFLP
FQQFGRDIADITDAVRDPQTLEILDITPCSFGGVSVITPGTNTSNQVAVLYQDVNCTEVPVAIHADQLTPTWRVYSTGS
NVFQTRAGCLIGAEHVNNSYECDIPIGAGICASYQTQTNSPSRAGSVASQSIIAYTMSLGAENSVAYSNNSIAIPTNFTISV
TTEILPVSMTKTSVDCTMYICGDSTECSNLLLQYGSFCTQLNRALTGIAVEQDKNTQEVFAQVKQIYKTPPIKDFGGFNFS
QILPDPSKPSKRSFIEDLLFNKVTLADAGFIKQYGDCLGDIAARDLICAQKFNGLTVLPPLLTDEMIAQYTSALLAGTITCG
WTFGAGACLQIPFAMQMAYRFNGIGVTQNVLYENQKLIANQFNSAIGKIQDSLSSTASALGKLQDVVNQNAQALNTL
VKQLSSNFGAISSVLNDILSRLDPPEAEVQIDRLITGRLQSLQTYVTQQLIRAAEIRASANLAATKMSECVLGQSKRVDFC
GKGYHLMSFPQSAPHGVVFLHVTYVPAQEKNFTTAPAICHDGKAHFPREGVFVSNGTHWFVTQRNFYEPQIITTDNTF
VSGNCDVVIGIVNNTVYDPLQPELDSFKEELDKYFKNHTSPDVDLGDISGINASVVNIQKEIDRLNEVAKNLNESLIDLQE
LGKYEQGSGYIPEAPRDGQAYVRKDGEWVLLSTFLGRSLEVLFQGPGSLPETGGGSDYKDDDDKGGGGSGGGGSGGG
GSGGGGSGGGGSHHHHHH
SEQ ID NO 125: SEQ ID NO 3 + N532P + G880C + F888C
MFVFLVLLPLVSSQCVNLTTRTQLPPAYTNSFTRGVYYPDKVFRSSVLHSTQDLFLPFFSNVTWFHAIHVSGTNGTKRFD
NPVLPFNDGVYFASTEKSNIIRGWIFGTTLDSKTQSLLIVNNATNVVIKVCEFQFCNDPFLGVYYHKNNKSWMESEFRVY
SSANNCTFEYVSQPFLMDLEGKQGNFKNLREFVFKNIDGYFKIYSKHTPINLVRDLPQGFSALEPLVDLPIGINITRFQTLL
ALHRSYLTPGDSSSGWTAGAAAYYVGYLQPRTFLLKYNENGTITDAVDCALDPLSETKCTLKSFTVEKGIYQTSNFRVQP
TESIVRFPNITNLCPFGEVFNATRFASVYAWNRKRISNCVADYSVLYNSASFSTFKCYGVSPTKLNDLCFTNVYADSFVIR
GDEVRQIAPGQTGKIADYNYKLPDDFTGCVIAWNSNNLDSKVGGNYNYLYRLFRKSNLKPFERDISTEIYQAGSTPCNG
VEGFNCYFPLQSYGFQPTNGVGYQPYRVVVLSFELLHAPATVCGPKKSTPLVKNKCVNFNFNGLTGTGVLTESNKKFLP
FQQFGRDIADTTDAVRDPQTLEILDITPCSFGGVSVITPGTNTSNQVAVLYQDVNCTEVPVAIHADQLTPTWRVYSTGS
NVFQTRAGCLIGAEHVNNSYECDIPIGAGICASYQTQTNSPSRAGSVASQSIIAYTMSLGAENSVAYSNNSIAIPTNFTISV
TTEILPVSMTKTSVDCTMYICGDSTECSNLLLQYGSFCTQLNRALTGIAVEQDKNTQEVFAQVKQIYKTPPIKDFGGFNFS
QILPDPSKPSKRSFIEDLLFNKVTLADAGFIKQYGDCLGDIAARDLICAQKFNGLTVLPPLLTDEMIAQYTSALLACTITSG
WTCGAGAALQIPFAMQMAYRFNGIGVTQNVLYENQKLIANQFNSAIGKIQDSLSSTASALGKLQDVVNQNAQALNTL
VKQLSSNFGAISSVLNDILSRLDPPEAEVQIDRLITGRLQSLQTYVTQQLIRAAEIRASANLAATKMSECVLGQSKRVDFC
GKGYHLMSFPQSAPHGVVFLHVTYVPAQEKNFTTAPAICHDGKAHFPREGVFVSNGTHWFVTQRNFYEPQIITTDNTF
VSGNCDVVIGIVNNTVYDPLQPELDSFKEELDKYFKNHTSPDVDLGDISGINASVVNIQKEIDRLNEVAKNLNESLIDLQE
LGKYEQGSGYIPEAPRDGQAYVRKDGEWVLLSTFLGRSLEVLFQGPGSLPETGGGSDYKDDDDKGGGGSGGGGSGGG
GSGGGGSGGGGSHHHHHH
SEQ ID NO 126: SEQ ID NO 3 + N532P + S884C + A893C
MFVFLVLLPLVSSQCVNLTTRTQLPPAYTNSFTRGVYYPDKVFRSSVLHSTQDLFLPFFSNVTWFHAIHVSGTNGTKRFD
NPVLPFNDGVYFASTEKSNIIRGWIFGTTLDSKTQSLLIVNNATNVVIKVCEFQFCNDPFLGVYYHKNNKSWMESEFRVY
SSANNCTFEYVSQPFLMDLEGKQGNFKNLREFVFKNIDGYFKIYSKHTPINLVRDLPQGFSALEPLVDLPIGINITRFQTLL
ALHRSYLTPGDSSSGWTAGAAAYYVGYLQPRTFLLKYNENGTITDAVDCALDPLSETKCTLKSFTVEKGIYQTSNFRVQP
TESIVRFPNITNLCPFGEVFNATRFASVYAWNRKRISNCVADYSVLYNSASFSTFKCYGVSPTKLNDLCFTNVYADSFVIR
GDEVRQIAPGQTGKIADYNYKLPDDFTGCVIAWNSNNLDSKVGGNYNYLYRLFRKSNLKPFERDISTEIYQAGSTPCNG
VEGFNCYFPLQSYGFQPTNGVGYQPYRVVVLSFELLHAPATVCGPKKSTPLVKNKCVNFNFNGLTGTGVLTESNKKFLP
FQQFGRDIADTTDAVRDPQTLEILDITPCSFGGVSVITPGTNTSNQVAVLYQDVNCTEVPVAIHADQLTPTWRVYSTGS
NVFQTRAGCLIGAEHVNNSYECDIPIGAGICASYQTQTNSPSRAGSVASQSIIAYTMSLGAENSVAYSNNSIAIPTNFTISV
TTEILPVSMTKTSVDCTMYICGDSTECSNLLLQYGSFCTQLNRALTGIAVEQDKNTQEVFAQVKQIYKTPPIKDFGGFNFS
QILPDPSKPSKRSFIEDLLFNKVTLADAGFIKQYGDCLGDIAARDLICAQKFNGLTVLPPLLTDEMIAQYTSALLAGTITCG
WTFGAGACLQIPFAMQMAYRFNGIGVTQNVLYENQKLIANQFNSAIGKIQDSLSSTASALGKLQDVVNQNAQALNTL
VKQLSSNFGAISSVLNDILSRLDPPEAEVQIDRLITGRLQSLQTYVTQQLIRAAEIRASANLAATKMSECVLGQSKRVDFC
GKGYHLMSFPQSAPHGVVFLHVTYVPAQEKNFTTAPAICHDGKAHFPREGVFVSNGTHWFVTQRNFYEPQIITTDNTF
VSGNCDVVIGIVNNTVYDPLQPELDSFKEELDKYFKNHTSPDVDLGDISGINASVVNIQKEIDRLNEVAKNLNESLIDLQE
LGKYEQGSGYIPEAPRDGQAYVRKDGEWVLLSTFLGRSLEVLFQGPGSLPETGGGSDYKDDDDKGGGGSGGGGSGGG
GSGGGGSGGGGSHHHHHH
SEQ ID NO 127: SEQ ID NO 3 + A942P + A892P + D614N
MFVFLVLLPLVSSQCVNLTTRTQLPPAYTNSFTRGVYYPDKVFRSSVLHSTQDLFLPFFSNVTWFHAIHVSGTNGTKRFD
NPVLPFNDGVYFASTEKSNIIRGWIFGTTLDSKTQSLLIVNNATNVVIKVCEFQFCNDPFLGVYYHKNNKSWMESEFRVY
SSANNCTFEYVSQPFLMDLEGKQGNFKNLREFVFKNIDGYFKIYSKHTPINLVRDLPQGFSALEPLVDLPIGINITRFQTLL
ALHRSYLTPGDSSSGWTAGAAAYYVGYLQPRTFLLKYNENGTITDAVDCALDPLSETKCTLKSFTVEKGIYQTSNFRVQP
TESIVRFPNITNLCPFGEVFNATRFASVYAWNRKRISNCVADYSVLYNSASFSTFKCYGVSPTKLNDLCFTNVYADSFVIR
GDEVRQIAPGQTGKIADYNYKLPDDFTGCVIAWNSNNLDSKVGGNYNYLYRLFRKSNLKPFERDISTEIYQAGSTPCNG
VEGFNCYFPLQSYGFQPTNGVGYQPYRVVVLSFELLHAPATVCGPKKSTNLVKNKCVNFNFNGLTGTGVLTESNKKFLP
FQQFGRDIADTTDAVRDPQTLEILDITPCSFGGVSVITPGTNTSNQVAVLYQNVNCTEVPVAIHADQLTPTWRVYSTGS
NVFQTRAGCLIGAEHVNNSYECDIPIGAGICASYQTQTNSPSRAGSVASQSIIAYTMSLGAENSVAYSNNSIAIPTNFTISV
TTEILPVSMTKTSVDCTMYICGDSTECSNLLLQYGSFCTQLNRALTGIAVEQDKNTQEVFAQVKQIYKTPPIKDFGGFNFS
QILPDPSKPSKRSFIEDLLFNKVTLADAGFIKQYGDCLGDIAARDLICAQKFNGLTVLPPLLTDEMIAQYTSALLAGTITSG
WTFGAGPALQIPFAMQMAYRFNGIGVTQNVLYENQKLIANQFNSAIGKIQDSLSSTPSALGKLQDVVNQNAQALNTL
VKQLSSNFGAISSVLNDILSRLDPPEAEVQIDRLITGRLQSLQTYVTQQLIRAAEIRASANLAATKMSECVLGQSKRVDFC
GKGYHLMSFPQSAPHGVVFLHVTYVPAQEKNFTTAPAICHDGKAHFPREGVFVSNGTHWFVTQRNFYEPQIITTDNTF
VSGNCDVVIGIVNNTVYDPLQPELDSFKEELDKYFKNHTSPDVDLGDISGINASVVNIQKEIDRLNEVAKNLNESLIDLQE
LGKYEQGSGYIPEAPRDGQAYVRKDGEWVLLSTFLGRSLEVLFQGPGSLPETGGGSDYKDDDDKGGGGSGGGGSGGG
GSGGGGSGGGGSHHHHHH
SEQ ID NO 128: SEQ ID NO 3 + A942P + A892P + T572I
MFVFLVLLPLVSSQCVNLTTRTQLPPAYTNSFTRGVYYPDKVFRSSVLHSTQDLFLPFFSNVTWFHAIHVSGTNGTKRFD
NPVLPFNDGVYFASTEKSNIIRGWIFGTTLDSKTQSLLIVNNATNVVIKVCEFQFCNDPFLGVYYHKNNKSWMESEFRVY
SSANNCTFEYVSQPFLMDLEGKQGNFKNLREFVFKNIDGYFKIYSKHTPINLVRDLPQGFSALEPLVDLPIGINITRFQTLL
ALHRSYLTPGDSSSGWTAGAAAYYVGYLQPRTFLLKYNENGTITDAVDCALDPLSETKCTLKSFTVEKGIYQTSNFRVQP
TESIVRFPNITNLCPFGEVFNATRFASVYAWNRKRISNCVADYSVLYNSASFSTFKCYGVSPTKLNDLCFTNVYADSFVIR
GDEVRQIAPGQTGKIADYNYKLPDDFTGCVIAWNSNNLDSKVGGNYNYLYRLFRKSNLKPFERDISTEIYQAGSTPCNG
VEGFNCYFPLQSYGFQPTNGVGYQPYRVVVLSFELLHAPATVCGPKKSTNLVKNKCVNFNFNGLTGTGVLTESNKKFLP
FQQFGRDIADITDAVRDPQTLEILDITPCSFGGVSVITPGTNTSNQVAVLYQDVNCTEVPVAIHADQLTPTWRVYSTGS
NVFQTRAGCLIGAEHVNNSYECDIPIGAGICASYQTQTNSPSRAGSVASQSIIAYTMSLGAENSVAYSNNSIAIPTNFTISV
TTEILPVSMTKTSVDCTMYICGDSTECSNLLLQYGSFCTQLNRALTGIAVEQDKNTQEVFAQVKQIYKTPPIKDFGGFNFS
QILPDPSKPSKRSFIEDLLFNKVTLADAGFIKQYGDCLGDIAARDLICAQKFNGLTVLPPLLTDEMIAQYTSALLAGTITSG
WTFGAGPALQIPFAMQMAYRFNGIGVTQNVLYENQKLIANQFNSAIGKIQDSLSSTPSALGKLQDVVNQNAQALNTL
VKQLSSNFGAISSVLNDILSRLDPPEAEVQIDRLITGRLQSLQTYVTQQLIRAAEIRASANLAATKMSECVLGQSKRVDFC
GKGYHLMSFPQSAPHGVVFLHVTYVPAQEKNFTTAPAICHDGKAHFPREGVFVSNGTHWFVTQRNFYEPQIITTDNTF
VSGNCDVVIGIVNNTVYDPLQPELDSFKEELDKYFKNHTSPDVDLGDISGINASVVNIQKEIDRLNEVAKNLNESLIDLQE
LGKYEQGSGYIPEAPRDGQAYVRKDGEWVLLSTFLGRSLEVLFQGPGSLPETGGGSDYKDDDDKGGGGSGGGGSGGG
GSGGGGSGGGGSHHHHHH
SEQ ID NO 129: SEQ ID NO 3 + A942P + A892P + N532P
MFVFLVLLPLVSSQCVNLTTRTQLPPAYTNSFTRGVYYPDKVFRSSVLHSTQDLFLPFFSNVTWFHAIHVSGTNGTKRFD
NPVLPFNDGVYFASTEKSNIIRGWIFGTTLDSKTQSLLIVNNATNVVIKVCEFQFCNDPFLGVYYHKNNKSWMESEFRVY
SSANNCTFEYVSQPFLMDLEGKQGNFKNLREFVFKNIDGYFKIYSKHTPINLVRDLPQGFSALEPLVDLPIGINITRFQTLL
ALHRSYLTPGDSSSGWTAGAAAYYVGYLQPRTFLLKYNENGTITDAVDCALDPLSETKCTLKSFTVEKGIYQTSNFRVQP
TESIVRFPNITNLCPFGEVFNATRFASVYAWNRKRISNCVADYSVLYNSASFSTFKCYGVSPTKLNDLCFTNVYADSFVIR
GDEVRQIAPGQTGKIADYNYKLPDDFTGCVIAWNSNNLDSKVGGNYNYLYRLFRKSNLKPFERDISTEIYQAGSTPCNG
VEGFNCYFPLQSYGFQPTNGVGYQPYRVVVLSFELLHAPATVCGPKKSTPLVKNKCVNFNFNGLTGTGVLTESNKKFLP
FQQFGRDIADTTDAVRDPQTLEILDITPCSFGGVSVITPGTNTSNQVAVLYQDVNCTEVPVAIHADQLTPTWRVYSTGS
NVFQTRAGCLIGAEHVNNSYECDIPIGAGICASYQTQTNSPSRAGSVASQSIIAYTMSLGAENSVAYSNNSIAIPTNFTISV
TTEILPVSMTKTSVDCTMYICGDSTECSNLLLQYGSFCTQLNRALTGIAVEQDKNTQEVFAQVKQIYKTPPIKDFGGFNFS
QILPDPSKPSKRSFIEDLLFNKVTLADAGFIKQYGDCLGDIAARDLICAQKFNGLTVLPPLLTDEMIAQYTSALLAGTITSG
WTFGAGPALQIPFAMQMAYRFNGIGVTQNVLYENQKLIANQFNSAIGKIQDSLSSTPSALGKLQDVVNQNAQALNTL
VKQLSSNFGAISSVLNDILSRLDPPEAEVQIDRLITGRLQSLQTYVTQQLIRAAEIRASANLAATKMSECVLGQSKRVDFC
GKGYHLMSFPQSAPHGVVFLHVTYVPAQEKNFTTAPAICHDGKAHFPREGVFVSNGTHWFVTQRNFYEPQIITTDNTF
VSGNCDVVIGIVNNTVYDPLQPELDSFKEELDKYFKNHTSPDVDLGDISGINASVVNIQKEIDRLNEVAKNLNESLIDLQE
LGKYEQGSGYIPEAPRDGQAYVRKDGEWVLLSTFLGRSLEVLFQGPGSLPETGGGSDYKDDDDKGGGGSGGGGSGGG
GSGGGGSGGGGSHHHHHH
SEQ ID NO 130: SEQ ID NO 3 + A942P + A892P + G880C + F888C
MFVFLVLLPLVSSQCVNLTTRTQLPPAYTNSFTRGVYYPDKVFRSSVLHSTQDLFLPFFSNVTWFHAIHVSGTNGTKRFD
NPVLPFNDGVYFASTEKSNIIRGWIFGTTLDSKTQSLLIVNNATNVVIKVCEFQFCNDPFLGVYYHKNNKSWMESEFRVY
SSANNCTFEYVSQPFLMDLEGKQGNFKNLREFVFKNIDGYFKIYSKHTPINLVRDLPQGFSALEPLVDLPIGINITRFQTLL
ALHRSYLTPGDSSSGWTAGAAAYYVGYLQPRTFLLKYNENGTITDAVDCALDPLSETKCTLKSFTVEKGIYQTSNFRVQP
TESIVRFPNITNLCPFGEVFNATRFASVYAWNRKRISNCVADYSVLYNSASFSTFKCYGVSPTKLNDLCFTNVYADSFVIR
GDEVRQIAPGQTGKIADYNYKLPDDFTGCVIAWNSNNLDSKVGGNYNYLYRLFRKSNLKPFERDISTEIYQAGSTPCNG
VEGFNCYFPLQSYGFQPTNGVGYQPYRVVVLSFELLHAPATVCGPKKSTNLVKNKCVNFNFNGLTGTGVLTESNKKFLP
FQQFGRDIADTTDAVRDPQTLEILDITPCSFGGVSVITPGTNTSNQVAVLYQDVNCTEVPVAIHADQLTPTWRVYSTGS
NVFQTRAGCLIGAEHVNNSYECDIPIGAGICASYQTQTNSPSRAGSVASQSIIAYTMSLGAENSVAYSNNSIAIPTNFTISV
TTEILPVSMTKTSVDCTMYICGDSTECSNLLLQYGSFCTQLNRALTGIAVEQDKNTQEVFAQVKQIYKTPPIKDFGGFNFS
QILPDPSKPSKRSFIEDLLFNKVTLADAGFIKQYGDCLGDIAARDLICAQKFNGLTVLPPLLTDEMIAQYTSALLACTITSG
WTCGAGPALQIPFAMQMAYRFNGIGVTQNVLYENQKLIANQFNSAIGKIQDSLSSTPSALGKLQDVVNQNAQALNTL
VKQLSSNFGAISSVLNDILSRLDPPEAEVQIDRLITGRLQSLQTYVTQQLIRAAEIRASANLAATKMSECVLGQSKRVDFC
GKGYHLMSFPQSAPHGVVFLHVTYVPAQEKNFTTAPAICHDGKAHFPREGVFVSNGTHWFVTQRNFYEPQIITTDNTF
VSGNCDVVIGIVNNTVYDPLQPELDSFKEELDKYFKNHTSPDVDLGDISGINASVVNIQKEIDRLNEVAKNLNESLIDLQE
LGKYEQGSGYIPEAPRDGQAYVRKDGEWVLLSTFLGRSLEVLFQGPGSLPETGGGSDYKDDDDKGGGGSGGGGSGGG
GSGGGGSGGGGSHHHHHH
SEQ ID NO 131: SEQ ID NO 3 + A942P + A892P + S884C + A893C
MFVFLVLLPLVSSQCVNLTTRTQLPPAYTNSFTRGVYYPDKVFRSSVLHSTQDLFLPFFSNVTWFHAIHVSGTNGTKRFD
NPVLPFNDGVYFASTEKSNIIRGWIFGTTLDSKTQSLLIVNNATNVVIKVCEFQFCNDPFLGVYYHKNNKSWMESEFRVY
SSANNCTFEYVSQPFLMDLEGKQGNFKNLREFVFKNIDGYFKIYSKHTPINLVRDLPQGFSALEPLVDLPIGINITRFQTLL
ALHRSYLTPGDSSSGWTAGAAAYYVGYLQPRTFLLKYNENGTITDAVDCALDPLSETKCTLKSFTVEKGIYQTSNFRVQP
TESIVRFPNITNLCPFGEVFNATRFASVYAWNRKRISNCVADYSVLYNSASFSTFKCYGVSPTKLNDLCFTNVYADSFVIR
GDEVRQIAPGQTGKIADYNYKLPDDFTGCVIAWNSNNLDSKVGGNYNYLYRLFRKSNLKPFERDISTEIYQAGSTPCNG
VEGFNCYFPLQSYGFQPTNGVGYQPYRVVVLSFELLHAPATVCGPKKSTNLVKNKCVNFNFNGLTGTGVLTESNKKFLP
FQQFGRDIADTTDAVRDPQTLEILDITPCSFGGVSVITPGTNTSNQVAVLYQDVNCTEVPVAIHADQLTPTWRVYSTGS
NVFQTRAGCLIGAEHVNNSYECDIPIGAGICASYQTQTNSPSRAGSVASQSIIAYTMSLGAENSVAYSNNSIAIPTNFTISV
TTEILPVSMTKTSVDCTMYICGDSTECSNLLLQYGSFCTQLNRALTGIAVEQDKNTQEVFAQVKQIYKTPPIKDFGGFNFS
QILPDPSKPSKRSFIEDLLFNKVTLADAGFIKQYGDCLGDIAARDLICAQKFNGLTVLPPLLTDEMIAQYTSALLAGTITCG
WTFGAGPCLQIPFAMQMAYRFNGIGVTQNVLYENQKLIANQFNSAIGKIQDSLSSTPSALGKLQDVVNQNAQALNTL
VKQLSSNFGAISSVLNDILSRLDPPEAEVQIDRLITGRLQSLQTYVTQQLIRAAEIRASANLAATKMSECVLGQSKRVDFC
GKGYHLMSFPQSAPHGVVFLHVTYVPAQEKNFTTAPAICHDGKAHFPREGVFVSNGTHWFVTQRNFYEPQIITTDNTF
VSGNCDVVIGIVNNTVYDPLQPELDSFKEELDKYFKNHTSPDVDLGDISGINASVVNIQKEIDRLNEVAKNLNESLIDLQE
LGKYEQGSGYIPEAPRDGQAYVRKDGEWVLLSTFLGRSLEVLFQGPGSLPETGGGSDYKDDDDKGGGGSGGGGSGGG
GSGGGGSGGGGSHHHHHH
SEQ ID NO 132: SEQ ID NO 3 + A942P + D614N + T572I
MFVFLVLLPLVSSQCVNLTTRTQLPPAYTNSFTRGVYYPDKVFRSSVLHSTQDLFLPFFSNVTWFHAIHVSGTNGTKRFD
NPVLPFNDGVYFASTEKSNIIRGWIFGTTLDSKTQSLLIVNNATNVVIKVCEFQFCNDPFLGVYYHKNNKSWMESEFRVY
SSANNCTFEYVSQPFLMDLEGKQGNFKNLREFVFKNIDGYFKIYSKHTPINLVRDLPQGFSALEPLVDLPIGINITRFQTLL
ALHRSYLTPGDSSSGWTAGAAAYYVGYLQPRTFLLKYNENGTITDAVDCALDPLSETKCTLKSFTVEKGIYQTSNFRVQP
TESIVRFPNITNLCPFGEVFNATRFASVYAWNRKRISNCVADYSVLYNSASFSTFKCYGVSPTKLNDLCFTNVYADSFVIR
GDEVRQIAPGQTGKIADYNYKLPDDFTGCVIAWNSNNLDSKVGGNYNYLYRLFRKSNLKPFERDISTEIYQAGSTPCNG
VEGFNCYFPLQSYGFQPTNGVGYQPYRVVVLSFELLHAPATVCGPKKSTNLVKNKCVNFNFNGLTGTGVLTESNKKFLP
FQQFGRDIADITDAVRDPQTLEILDITPCSFGGVSVITPGTNTSNQVAVLYQNVNCTEVPVAIHADQLTPTWRVYSTGS
NVFQTRAGCLIGAEHVNNSYECDIPIGAGICASYQTQTNSPSRAGSVASQSIIAYTMSLGAENSVAYSNNSIAIPTNFTISV
TTEILPVSMTKTSVDCTMYICGDSTECSNLLLQYGSFCTQLNRALTGIAVEQDKNTQEVFAQVKQIYKTPPIKDFGGFNFS
QILPDPSKPSKRSFIEDLLFNKVTLADAGFIKQYGDCLGDIAARDLICAQKFNGLTVLPPLLTDEMIAQYTSALLAGTITSG
WTFGAGAALQIPFAMQMAYRFNGIGVTQNVLYENQKLIANQFNSAIGKIQDSLSSTPSALGKLQDVVNQNAQALNTL
VKQLSSNFGAISSVLNDILSRLDPPEAEVQIDRLITGRLQSLQTYVTQQLIRAAEIRASANLAATKMSECVLGQSKRVDFC
GKGYHLMSFPQSAPHGVVFLHVTYVPAQEKNFTTAPAICHDGKAHFPREGVFVSNGTHWFVTQRNFYEPQIITTDNTF
VSGNCDVVIGIVNNTVYDPLQPELDSFKEELDKYFKNHTSPDVDLGDISGINASVVNIQKEIDRLNEVAKNLNESLIDLQE
LGKYEQGSGYIPEAPRDGQAYVRKDGEWVLLSTFLGRSLEVLFQGPGSLPETGGGSDYKDDDDKGGGGSGGGGSGGG
GSGGGGSGGGGSHHHHHH
SEQ ID NO 133: SEQ ID NO 3 + A942P + D614N + N532P
MFVFLVLLPLVSSQCVNLTTRTQLPPAYTNSFTRGVYYPDKVFRSSVLHSTQDLFLPFFSNVTWFHAIHVSGTNGTKRFD
NPVLPFNDGVYFASTEKSNIIRGWIFGTTLDSKTQSLLIVNNATNVVIKVCEFQFCNDPFLGVYYHKNNKSWMESEFRVY
SSANNCTFEYVSQPFLMDLEGKQGNFKNLREFVFKNIDGYFKIYSKHTPINLVRDLPQGFSALEPLVDLPIGINITRFQTLL
ALHRSYLTPGDSSSGWTAGAAAYYVGYLQPRTFLLKYNENGTITDAVDCALDPLSETKCTLKSFTVEKGIYQTSNFRVQP
TESIVRFPNITNLCPFGEVFNATRFASVYAWNRKRISNCVADYSVLYNSASFSTFKCYGVSPTKLNDLCFTNVYADSFVIR
GDEVRQIAPGQTGKIADYNYKLPDDFTGCVIAWNSNNLDSKVGGNYNYLYRLFRKSNLKPFERDISTEIYQAGSTPCNG
VEGFNCYFPLQSYGFQPTNGVGYQPYRVVVLSFELLHAPATVCGPKKSTPLVKNKCVNFNFNGLTGTGVLTESNKKFLP
FQQFGRDIADTTDAVRDPQTLEILDITPCSFGGVSVITPGTNTSNQVAVLYQNVNCTEVPVAIHADQLTPTWRVYSTGS
NVFQTRAGCLIGAEHVNNSYECDIPIGAGICASYQTQTNSPSRAGSVASQSIIAYTMSLGAENSVAYSNNSIAIPTNFTISV
TTEILPVSMTKTSVDCTMYICGDSTECSNLLLQYGSFCTQLNRALTGIAVEQDKNTQEVFAQVKQIYKTPPIKDFGGFNFS
QILPDPSKPSKRSFIEDLLFNKVTLADAGFIKQYGDCLGDIAARDLICAQKFNGLTVLPPLLTDEMIAQYTSALLAGTITSG
WTFGAGAALQIPFAMQMAYRFNGIGVTQNVLYENQKLIANQFNSAIGKIQDSLSSTPSALGKLQDVVNQNAQALNTL
VKQLSSNFGAISSVLNDILSRLDPPEAEVQIDRLITGRLQSLQTYVTQQLIRAAEIRASANLAATKMSECVLGQSKRVDFC
GKGYHLMSFPQSAPHGVVFLHVTYVPAQEKNFTTAPAICHDGKAHFPREGVFVSNGTHWFVTQRNFYEPQIITTDNTF
VSGNCDVVIGIVNNTVYDPLQPELDSFKEELDKYFKNHTSPDVDLGDISGINASVVNIQKEIDRLNEVAKNLNESLIDLQE
LGKYEQGSGYIPEAPRDGQAYVRKDGEWVLLSTFLGRSLEVLFQGPGSLPETGGGSDYKDDDDKGGGGSGGGGSGGG
GSGGGGSGGGGSHHHHHH
SEQ ID NO 134: SEQ ID NO 3 + A942P + D614N + G880C + F888C
MFVFLVLLPLVSSQCVNLTTRTQLPPAYTNSFTRGVYYPDKVFRSSVLHSTQDLFLPFFSNVTWFHAIHVSGTNGTKRFD
NPVLPFNDGVYFASTEKSNIIRGWIFGTTLDSKTQSLLIVNNATNVVIKVCEFQFCNDPFLGVYYHKNNKSWMESEFRVY
SSANNCTFEYVSQPFLMDLEGKQGNFKNLREFVFKNIDGYFKIYSKHTPINLVRDLPQGFSALEPLVDLPIGINITRFQTLL
ALHRSYLTPGDSSSGWTAGAAAYYVGYLQPRTFLLKYNENGTITDAVDCALDPLSETKCTLKSFTVEKGIYQTSNFRVQP
TESIVRFPNITNLCPFGEVFNATRFASVYAWNRKRISNCVADYSVLYNSASFSTFKCYGVSPTKLNDLCFTNVYADSFVIR
GDEVRQIAPGQTGKIADYNYKLPDDFTGCVIAWNSNNLDSKVGGNYNYLYRLFRKSNLKPFERDISTEIYQAGSTPCNG
VEGFNCYFPLQSYGFQPTNGVGYQPYRVVVLSFELLHAPATVCGPKKSTNLVKNKCVNFNFNGLTGTGVLTESNKKFLP
FQQFGRDIADTTDAVRDPQTLEILDITPCSFGGVSVITPGTNTSNQVAVLYQNVNCTEVPVAIHADQLTPTWRVYSTGS
NVFQTRAGCLIGAEHVNNSYECDIPIGAGICASYQTQTNSPSRAGSVASQSIIAYTMSLGAENSVAYSNNSIAIPTNFTISV
TTEILPVSMTKTSVDCTMYICGDSTECSNLLLQYGSFCTQLNRALTGIAVEQDKNTQEVFAQVKQIYKTPPIKDFGGFNFS
QILPDPSKPSKRSFIEDLLFNKVTLADAGFIKQYGDCLGDIAARDLICAQKFNGLTVLPPLLTDEMIAQYTSALLACTITSG
WTCGAGAALQIPFAMQMAYRFNGIGVTQNVLYENQKLIANQFNSAIGKIQDSLSSTPSALGKLQDVVNQNAQALNTL
VKQLSSNFGAISSVLNDILSRLDPPEAEVQIDRLITGRLQSLQTYVTQQLIRAAEIRASANLAATKMSECVLGQSKRVDFC
GKGYHLMSFPQSAPHGVVFLHVTYVPAQEKNFTTAPAICHDGKAHFPREGVFVSNGTHWFVTQRNFYEPQIITTDNTF
VSGNCDVVIGIVNNTVYDPLQPELDSFKEELDKYFKNHTSPDVDLGDISGINASVVNIQKEIDRLNEVAKNLNESLIDLQE
LGKYEQGSGYIPEAPRDGQAYVRKDGEWVLLSTFLGRSLEVLFQGPGSLPETGGGSDYKDDDDKGGGGSGGGGSGGG
GSGGGGSGGGGSHHHHHH
SEQ ID NO 135: SEQ ID NO 3 + A942P + D614N + S884C + A893C
MFVFLVLLPLVSSQCVNLTTRTQLPPAYTNSFTRGVYYPDKVFRSSVLHSTQDLFLPFFSNVTWFHAIHVSGTNGTKRFD
NPVLPFNDGVYFASTEKSNIIRGWIFGTTLDSKTQSLLIVNNATNVVIKVCEFQFCNDPFLGVYYHKNNKSWMESEFRVY
SSANNCTFEYVSQPFLMDLEGKQGNFKNLREFVFKNIDGYFKIYSKHTPINLVRDLPQGFSALEPLVDLPIGINITRFQTLL
ALHRSYLTPGDSSSGWTAGAAAYYVGYLQPRTFLLKYNENGTITDAVDCALDPLSETKCTLKSFTVEKGIYQTSNFRVQP
TESIVRFPNITNLCPFGEVFNATRFASVYAWNRKRISNCVADYSVLYNSASFSTFKCYGVSPTKLNDLCFTNVYADSFVIR
GDEVRQIAPGQTGKIADYNYKLPDDFTGCVIAWNSNNLDSKVGGNYNYLYRLFRKSNLKPFERDISTEIYQAGSTPCNG
VEGFNCYFPLQSYGFQPTNGVGYQPYRVVVLSFELLHAPATVCGPKKSTNLVKNKCVNFNFNGLTGTGVLTESNKKFLP
FQQFGRDIADTTDAVRDPQTLEILDITPCSFGGVSVITPGTNTSNQVAVLYQNVNCTEVPVAIHADQLTPTWRVYSTGS
NVFQTRAGCLIGAEHVNNSYECDIPIGAGICASYQTQTNSPSRAGSVASQSIIAYTMSLGAENSVAYSNNSIAIPTNFTISV
TTEILPVSMTKTSVDCTMYICGDSTECSNLLLQYGSFCTQLNRALTGIAVEQDKNTQEVFAQVKQIYKTPPIKDFGGFNFS
QILPDPSKPSKRSFIEDLLFNKVTLADAGFIKQYGDCLGDIAARDLICAQKFNGLTVLPPLLTDEMIAQYTSALLAGTITCG
WTFGAGACLQIPFAMQMAYRFNGIGVTQNVLYENQKLIANQFNSAIGKIQDSLSSTPSALGKLQDVVNQNAQALNTL
VKQLSSNFGAISSVLNDILSRLDPPEAEVQIDRLITGRLQSLQTYVTQQLIRAAEIRASANLAATKMSECVLGQSKRVDFC
GKGYHLMSFPQSAPHGVVFLHVTYVPAQEKNFTTAPAICHDGKAHFPREGVFVSNGTHWFVTQRNFYEPQIITTDNTF
VSGNCDVVIGIVNNTVYDPLQPELDSFKEELDKYFKNHTSPDVDLGDISGINASVVNIQKEIDRLNEVAKNLNESLIDLQE
LGKYEQGSGYIPEAPRDGQAYVRKDGEWVLLSTFLGRSLEVLFQGPGSLPETGGGSDYKDDDDKGGGGSGGGGSGGG
GSGGGGSGGGGSHHHHHH
SEQ ID NO 136: SEQ ID NO 3 + A942P + T572I + N532P
MFVFLVLLPLVSSQCVNLTTRTQLPPAYTNSFTRGVYYPDKVFRSSVLHSTQDLFLPFFSNVTWFHAIHVSGTNGTKRFD
NPVLPFNDGVYFASTEKSNIIRGWIFGTTLDSKTQSLLIVNNATNVVIKVCEFQFCNDPFLGVYYHKNNKSWMESEFRVY
SSANNCTFEYVSQPFLMDLEGKQGNFKNLREFVFKNIDGYFKIYSKHTPINLVRDLPQGFSALEPLVDLPIGINITRFQTLL
ALHRSYLTPGDSSSGWTAGAAAYYVGYLQPRTFLLKYNENGTITDAVDCALDPLSETKCTLKSFTVEKGIYQTSNFRVQP
TESIVRFPNITNLCPFGEVFNATRFASVYAWNRKRISNCVADYSVLYNSASFSTFKCYGVSPTKLNDLCFTNVYADSFVIR
GDEVRQIAPGQTGKIADYNYKLPDDFTGCVIAWNSNNLDSKVGGNYNYLYRLFRKSNLKPFERDISTEIYQAGSTPCNG
VEGFNCYFPLQSYGFQPTNGVGYQPYRVVVLSFELLHAPATVCGPKKSTPLVKNKCVNFNFNGLTGTGVLTESNKKFLP
FQQFGRDIADITDAVRDPQTLEILDITPCSFGGVSVITPGTNTSNQVAVLYQDVNCTEVPVAIHADQLTPTWRVYSTGS
NVFQTRAGCLIGAEHVNNSYECDIPIGAGICASYQTQTNSPSRAGSVASQSIIAYTMSLGAENSVAYSNNSIAIPTNFTISV
TTEILPVSMTKTSVDCTMYICGDSTECSNLLLQYGSFCTQLNRALTGIAVEQDKNTQEVFAQVKQIYKTPPIKDFGGFNFS
QILPDPSKPSKRSFIEDLLFNKVTLADAGFIKQYGDCLGDIAARDLICAQKFNGLTVLPPLLTDEMIAQYTSALLAGTITSG
WTFGAGAALQIPFAMQMAYRFNGIGVTQNVLYENQKLIANQFNSAIGKIQDSLSSTPSALGKLQDVVNQNAQALNTL
VKQLSSNFGAISSVLNDILSRLDPPEAEVQIDRLITGRLQSLQTYVTQQLIRAAEIRASANLAATKMSECVLGQSKRVDFC
GKGYHLMSFPQSAPHGVVFLHVTYVPAQEKNFTTAPAICHDGKAHFPREGVFVSNGTHWFVTQRNFYEPQIITTDNTF
VSGNCDVVIGIVNNTVYDPLQPELDSFKEELDKYFKNHTSPDVDLGDISGINASVVNIQKEIDRLNEVAKNLNESLIDLQE
LGKYEQGSGYIPEAPRDGQAYVRKDGEWVLLSTFLGRSLEVLFQGPGSLPETGGGSDYKDDDDKGGGGSGGGGSGGG
GSGGGGSGGGGSHHHHHH
SEQ ID NO 137: SEQ ID NO 3 + A942P + T572I + G880C + F888C
MFVFLVLLPLVSSQCVNLTTRTQLPPAYTNSFTRGVYYPDKVFRSSVLHSTQDLFLPFFSNVTWFHAIHVSGTNGTKRFD
NPVLPFNDGVYFASTEKSNIIRGWIFGTTLDSKTQSLLIVNNATNVVIKVCEFQFCNDPFLGVYYHKNNKSWMESEFRVY
SSANNCTFEYVSQPFLMDLEGKQGNFKNLREFVFKNIDGYFKIYSKHTPINLVRDLPQGFSALEPLVDLPIGINITRFQTLL
ALHRSYLTPGDSSSGWTAGAAAYYVGYLQPRTFLLKYNENGTITDAVDCALDPLSETKCTLKSFTVEKGIYQTSNFRVQP
TESIVRFPNITNLCPFGEVFNATRFASVYAWNRKRISNCVADYSVLYNSASFSTFKCYGVSPTKLNDLCFTNVYADSFVIR
GDEVRQIAPGQTGKIADYNYKLPDDFTGCVIAWNSNNLDSKVGGNYNYLYRLFRKSNLKPFERDISTEIYQAGSTPCNG
VEGFNCYFPLQSYGFQPTNGVGYQPYRVVVLSFELLHAPATVCGPKKSTNLVKNKCVNFNFNGLTGTGVLTESNKKFLP
FQQFGRDIADITDAVRDPQTLEILDITPCSFGGVSVITPGTNTSNQVAVLYQDVNCTEVPVAIHADQLTPTWRVYSTGS
NVFQTRAGCLIGAEHVNNSYECDIPIGAGICASYQTQTNSPSRAGSVASQSIIAYTMSLGAENSVAYSNNSIAIPTNFTISV
TTEILPVSMTKTSVDCTMYICGDSTECSNLLLQYGSFCTQLNRALTGIAVEQDKNTQEVFAQVKQIYKTPPIKDFGGFNFS
QILPDPSKPSKRSFIEDLLFNKVTLADAGFIKQYGDCLGDIAARDLICAQKFNGLTVLPPLLTDEMIAQYTSALLACTITSG
WTCGAGAALQIPFAMQMAYRFNGIGVTQNVLYENQKLIANQFNSAIGKIQDSLSSTPSALGKLQDVVNQNAQALNTL
VKQLSSNFGAISSVLNDILSRLDPPEAEVQIDRLITGRLQSLQTYVTQQLIRAAEIRASANLAATKMSECVLGQSKRVDFC
GKGYHLMSFPQSAPHGVVFLHVTYVPAQEKNFTTAPAICHDGKAHFPREGVFVSNGTHWFVTQRNFYEPQIITTDNTF
VSGNCDVVIGIVNNTVYDPLQPELDSFKEELDKYFKNHTSPDVDLGDISGINASVVNIQKEIDRLNEVAKNLNESLIDLQE
LGKYEQGSGYIPEAPRDGQAYVRKDGEWVLLSTFLGRSLEVLFQGPGSLPETGGGSDYKDDDDKGGGGSGGGGSGGG
GSGGGGSGGGGSHHHHHH
SEQ ID NO 138: SEQ ID NO 3 + A942P + T572I + S884C + A893C
MFVFLVLLPLVSSQCVNLTTRTQLPPAYTNSFTRGVYYPDKVFRSSVLHSTQDLFLPFFSNVTWFHAIHVSGTNGTKRFD
NPVLPFNDGVYFASTEKSNIIRGWIFGTTLDSKTQSLLIVNNATNVVIKVCEFQFCNDPFLGVYYHKNNKSWMESEFRVY
SSANNCTFEYVSQPFLMDLEGKQGNFKNLREFVFKNIDGYFKIYSKHTPINLVRDLPQGFSALEPLVDLPIGINITRFQTLL
ALHRSYLTPGDSSSGWTAGAAAYYVGYLQPRTFLLKYNENGTITDAVDCALDPLSETKCTLKSFTVEKGIYQTSNFRVQP
TESIVRFPNITNLCPFGEVFNATRFASVYAWNRKRISNCVADYSVLYNSASFSTFKCYGVSPTKLNDLCFTNVYADSFVIR
GDEVRQIAPGQTGKIADYNYKLPDDFTGCVIAWNSNNLDSKVGGNYNYLYRLFRKSNLKPFERDISTEIYQAGSTPCNG
VEGFNCYFPLQSYGFQPTNGVGYQPYRVVVLSFELLHAPATVCGPKKSTNLVKNKCVNFNFNGLTGTGVLTESNKKFLP
FQQFGRDIADITDAVRDPQTLEILDITPCSFGGVSVITPGTNTSNQVAVLYQDVNCTEVPVAIHADQLTPTWRVYSTGS
NVFQTRAGCLIGAEHVNNSYECDIPIGAGICASYQTQTNSPSRAGSVASQSIIAYTMSLGAENSVAYSNNSIAIPTNFTISV
TTEILPVSMTKTSVDCTMYICGDSTECSNLLLQYGSFCTQLNRALTGIAVEQDKNTQEVFAQVKQIYKTPPIKDFGGFNFS
QILPDPSKPSKRSFIEDLLFNKVTLADAGFIKQYGDCLGDIAARDLICAQKFNGLTVLPPLLTDEMIAQYTSALLAGTITCG
WTFGAGACLQIPFAMQMAYRFNGIGVTQNVLYENQKLIANQFNSAIGKIQDSLSSTPSALGKLQDVVNQNAQALNTL
VKQLSSNFGAISSVLNDILSRLDPPEAEVQIDRLITGRLQSLQTYVTQQLIRAAEIRASANLAATKMSECVLGQSKRVDFC
GKGYHLMSFPQSAPHGVVFLHVTYVPAQEKNFTTAPAICHDGKAHFPREGVFVSNGTHWFVTQRNFYEPQIITTDNTF
VSGNCDVVIGIVNNTVYDPLQPELDSFKEELDKYFKNHTSPDVDLGDISGINASVVNIQKEIDRLNEVAKNLNESLIDLQE
LGKYEQGSGYIPEAPRDGQAYVRKDGEWVLLSTFLGRSLEVLFQGPGSLPETGGGSDYKDDDDKGGGGSGGGGSGGG
GSGGGGSGGGGSHHHHHH
SEQ ID NO 139: SEQ ID NO 3 + A942P + N532P + G880C + F888C
MFVFLVLLPLVSSQCVNLTTRTQLPPAYTNSFTRGVYYPDKVFRSSVLHSTQDLFLPFFSNVTWFHAIHVSGTNGTKRFD
NPVLPFNDGVYFASTEKSNIIRGWIFGTTLDSKTQSLLIVNNATNVVIKVCEFQFCNDPFLGVYYHKNNKSWMESEFRVY
SSANNCTFEYVSQPFLMDLEGKQGNFKNLREFVFKNIDGYFKIYSKHTPINLVRDLPQGFSALEPLVDLPIGINITRFQTLL
ALHRSYLTPGDSSSGWTAGAAAYYVGYLQPRTFLLKYNENGTITDAVDCALDPLSETKCTLKSFTVEKGIYQTSNFRVQP
TESIVRFPNITNLCPFGEVFNATRFASVYAWNRKRISNCVADYSVLYNSASFSTFKCYGVSPTKLNDLCFTNVYADSFVIR
GDEVRQIAPGQTGKIADYNYKLPDDFTGCVIAWNSNNLDSKVGGNYNYLYRLFRKSNLKPFERDISTEIYQAGSTPCNG
VEGFNCYFPLQSYGFQPTNGVGYQPYRVVVLSFELLHAPATVCGPKKSTPLVKNKCVNFNFNGLTGTGVLTESNKKFLP
FQQFGRDIADTTDAVRDPQTLEILDITPCSFGGVSVITPGTNTSNQVAVLYQDVNCTEVPVAIHADQLTPTWRVYSTGS
NVFQTRAGCLIGAEHVNNSYECDIPIGAGICASYQTQTNSPSRAGSVASQSIIAYTMSLGAENSVAYSNNSIAIPTNFTISV
TTEILPVSMTKTSVDCTMYICGDSTECSNLLLQYGSFCTQLNRALTGIAVEQDKNTQEVFAQVKQIYKTPPIKDFGGFNFS
QILPDPSKPSKRSFIEDLLFNKVTLADAGFIKQYGDCLGDIAARDLICAQKFNGLTVLPPLLTDEMIAQYTSALLACTITSG
WTCGAGAALQIPFAMQMAYRFNGIGVTQNVLYENQKLIANQFNSAIGKIQDSLSSTPSALGKLQDVVNQNAQALNTL
VKQLSSNFGAISSVLNDILSRLDPPEAEVQIDRLITGRLQSLQTYVTQQLIRAAEIRASANLAATKMSECVLGQSKRVDFC
GKGYHLMSFPQSAPHGVVFLHVTYVPAQEKNFTTAPAICHDGKAHFPREGVFVSNGTHWFVTQRNFYEPQIITTDNTF
VSGNCDVVIGIVNNTVYDPLQPELDSFKEELDKYFKNHTSPDVDLGDISGINASVVNIQKEIDRLNEVAKNLNESLIDLQE
LGKYEQGSGYIPEAPRDGQAYVRKDGEWVLLSTFLGRSLEVLFQGPGSLPETGGGSDYKDDDDKGGGGSGGGGSGGG
GSGGGGSGGGGSHHHHHH
SEQ ID NO 140: SEQ ID NO 3 + A942P + N532P + S884C + A893C
MFVFLVLLPLVSSQCVNLTTRTQLPPAYTNSFTRGVYYPDKVFRSSVLHSTQDLFLPFFSNVTWFHAIHVSGTNGTKRFD
NPVLPFNDGVYFASTEKSNIIRGWIFGTTLDSKTQSLLIVNNATNVVIKVCEFQFCNDPFLGVYYHKNNKSWMESEFRVY
SSANNCTFEYVSQPFLMDLEGKQGNFKNLREFVFKNIDGYFKIYSKHTPINLVRDLPQGFSALEPLVDLPIGINITRFQTLL
ALHRSYLTPGDSSSGWTAGAAAYYVGYLQPRTFLLKYNENGTITDAVDCALDPLSETKCTLKSFTVEKGIYQTSNFRVQP
TESIVRFPNITNLCPFGEVFNATRFASVYAWNRKRISNCVADYSVLYNSASFSTFKCYGVSPTKLNDLCFTNVYADSFVIR
GDEVRQIAPGQTGKIADYNYKLPDDFTGCVIAWNSNNLDSKVGGNYNYLYRLFRKSNLKPFERDISTEIYQAGSTPCNG
VEGFNCYFPLQSYGFQPTNGVGYQPYRVVVLSFELLHAPATVCGPKKSTPLVKNKCVNFNFNGLTGTGVLTESNKKFLP
FQQFGRDIADTTDAVRDPQTLEILDITPCSFGGVSVITPGTNTSNQVAVLYQDVNCTEVPVAIHADQLTPTWRVYSTGS
NVFQTRAGCLIGAEHVNNSYECDIPIGAGICASYQTQTNSPSRAGSVASQSIIAYTMSLGAENSVAYSNNSIAIPTNFTISV
TTEILPVSMTKTSVDCTMYICGDSTECSNLLLQYGSFCTQLNRALTGIAVEQDKNTQEVFAQVKQIYKTPPIKDFGGFNFS
QILPDPSKPSKRSFIEDLLFNKVTLADAGFIKQYGDCLGDIAARDLICAQKFNGLTVLPPLLTDEMIAQYTSALLAGTITCG
WTFGAGACLQIPFAMQMAYRFNGIGVTQNVLYENQKLIANQFNSAIGKIQDSLSSTPSALGKLQDVVNQNAQALNTL
VKQLSSNFGAISSVLNDILSRLDPPEAEVQIDRLITGRLQSLQTYVTQQLIRAAEIRASANLAATKMSECVLGQSKRVDFC
GKGYHLMSFPQSAPHGVVFLHVTYVPAQEKNFTTAPAICHDGKAHFPREGVFVSNGTHWFVTQRNFYEPQIITTDNTF
VSGNCDVVIGIVNNTVYDPLQPELDSFKEELDKYFKNHTSPDVDLGDISGINASVVNIQKEIDRLNEVAKNLNESLIDLQE
LGKYEQGSGYIPEAPRDGQAYVRKDGEWVLLSTFLGRSLEVLFQGPGSLPETGGGSDYKDDDDKGGGGSGGGGSGGG
GSGGGGSGGGGSHHHHHH
SEQ ID NO 141: SEQ ID NO 3 + A892P + D614N + T572I
MFVFLVLLPLVSSQCVNLTTRTQLPPAYTNSFTRGVYYPDKVFRSSVLHSTQDLFLPFFSNVTWFHAIHVSGTNGTKRFD
NPVLPFNDGVYFASTEKSNIIRGWIFGTTLDSKTQSLLIVNNATNVVIKVCEFQFCNDPFLGVYYHKNNKSWMESEFRVY
SSANNCTFEYVSQPFLMDLEGKQGNFKNLREFVFKNIDGYFKIYSKHTPINLVRDLPQGFSALEPLVDLPIGINITRFQTLL
ALHRSYLTPGDSSSGWTAGAAAYYVGYLQPRTFLLKYNENGTITDAVDCALDPLSETKCTLKSFTVEKGIYQTSNFRVQP
TESIVRFPNITNLCPFGEVFNATRFASVYAWNRKRISNCVADYSVLYNSASFSTFKCYGVSPTKLNDLCFTNVYADSFVIR
GDEVRQIAPGQTGKIADYNYKLPDDFTGCVIAWNSNNLDSKVGGNYNYLYRLFRKSNLKPFERDISTEIYQAGSTPCNG
VEGFNCYFPLQSYGFQPTNGVGYQPYRVVVLSFELLHAPATVCGPKKSTNLVKNKCVNFNFNGLTGTGVLTESNKKFLP
FQQFGRDIADITDAVRDPQTLEILDITPCSFGGVSVITPGTNTSNQVAVLYQNVNCTEVPVAIHADQLTPTWRVYSTGS
NVFQTRAGCLIGAEHVNNSYECDIPIGAGICASYQTQTNSPSRAGSVASQSIIAYTMSLGAENSVAYSNNSIAIPTNFTISV
TTEILPVSMTKTSVDCTMYICGDSTECSNLLLQYGSFCTQLNRALTGIAVEQDKNTQEVFAQVKQIYKTPPIKDFGGFNFS
QILPDPSKPSKRSFIEDLLFNKVTLADAGFIKQYGDCLGDIAARDLICAQKFNGLTVLPPLLTDEMIAQYTSALLAGTITSG
WTFGAGPALQIPFAMQMAYRFNGIGVTQNVLYENQKLIANQFNSAIGKIQDSLSSTASALGKLQDVVNQNAQALNTL
VKQLSSNFGAISSVLNDILSRLDPPEAEVQIDRLITGRLQSLQTYVTQQLIRAAEIRASANLAATKMSECVLGQSKRVDFC
GKGYHLMSFPQSAPHGVVFLHVTYVPAQEKNFTTAPAICHDGKAHFPREGVFVSNGTHWFVTQRNFYEPQIITTDNTF
VSGNCDVVIGIVNNTVYDPLQPELDSFKEELDKYFKNHTSPDVDLGDISGINASVVNIQKEIDRLNEVAKNLNESLIDLQE
LGKYEQGSGYIPEAPRDGQAYVRKDGEWVLLSTFLGRSLEVLFQGPGSLPETGGGSDYKDDDDKGGGGSGGGGSGGG
GSGGGGSGGGGSHHHHHH
SEQ ID NO 142: SEQ ID NO 3 + A892P + D614N + N532P
MFVFLVLLPLVSSQCVNLTTRTQLPPAYTNSFTRGVYYPDKVFRSSVLHSTQDLFLPFFSNVTWFHAIHVSGTNGTKRFD
NPVLPFNDGVYFASTEKSNIIRGWIFGTTLDSKTQSLLIVNNATNVVIKVCEFQFCNDPFLGVYYHKNNKSWMESEFRVY
SSANNCTFEYVSQPFLMDLEGKQGNFKNLREFVFKNIDGYFKIYSKHTPINLVRDLPQGFSALEPLVDLPIGINITRFQTLL
ALHRSYLTPGDSSSGWTAGAAAYYVGYLQPRTFLLKYNENGTITDAVDCALDPLSETKCTLKSFTVEKGIYQTSNFRVQP
TESIVRFPNITNLCPFGEVFNATRFASVYAWNRKRISNCVADYSVLYNSASFSTFKCYGVSPTKLNDLCFTNVYADSFVIR
GDEVRQIAPGQTGKIADYNYKLPDDFTGCVIAWNSNNLDSKVGGNYNYLYRLFRKSNLKPFERDISTEIYQAGSTPCNG
VEGFNCYFPLQSYGFQPTNGVGYQPYRVVVLSFELLHAPATVCGPKKSTPLVKNKCVNFNFNGLTGTGVLTESNKKFLP
FQQFGRDIADTTDAVRDPQTLEILDITPCSFGGVSVITPGTNTSNQVAVLYQNVNCTEVPVAIHADQLTPTWRVYSTGS
NVFQTRAGCLIGAEHVNNSYECDIPIGAGICASYQTQTNSPSRAGSVASQSIIAYTMSLGAENSVAYSNNSIAIPTNFTISV
TTEILPVSMTKTSVDCTMYICGDSTECSNLLLQYGSFCTQLNRALTGIAVEQDKNTQEVFAQVKQIYKTPPIKDFGGFNFS
QILPDPSKPSKRSFIEDLLFNKVTLADAGFIKQYGDCLGDIAARDLICAQKFNGLTVLPPLLTDEMIAQYTSALLAGTITSG
WTFGAGPALQIPFAMQMAYRFNGIGVTQNVLYENQKLIANQFNSAIGKIQDSLSSTASALGKLQDVVNQNAQALNTL
VKQLSSNFGAISSVLNDILSRLDPPEAEVQIDRLITGRLQSLQTYVTQQLIRAAEIRASANLAATKMSECVLGQSKRVDFC
GKGYHLMSFPQSAPHGVVFLHVTYVPAQEKNFTTAPAICHDGKAHFPREGVFVSNGTHWFVTQRNFYEPQIITTDNTF
VSGNCDVVIGIVNNTVYDPLQPELDSFKEELDKYFKNHTSPDVDLGDISGINASVVNIQKEIDRLNEVAKNLNESLIDLQE
LGKYEQGSGYIPEAPRDGQAYVRKDGEWVLLSTFLGRSLEVLFQGPGSLPETGGGSDYKDDDDKGGGGSGGGGSGGG
GSGGGGSGGGGSHHHHHH
SEQ ID NO 143: SEQ ID NO 3 + A892P + D614N + G880C + F888C
MFVFLVLLPLVSSQCVNLTTRTQLPPAYTNSFTRGVYYPDKVFRSSVLHSTQDLFLPFFSNVTWFHAIHVSGTNGTKRFD
NPVLPFNDGVYFASTEKSNIIRGWIFGTTLDSKTQSLLIVNNATNVVIKVCEFQFCNDPFLGVYYHKNNKSWMESEFRVY
SSANNCTFEYVSQPFLMDLEGKQGNFKNLREFVFKNIDGYFKIYSKHTPINLVRDLPQGFSALEPLVDLPIGINITRFQTLL
ALHRSYLTPGDSSSGWTAGAAAYYVGYLQPRTFLLKYNENGTITDAVDCALDPLSETKCTLKSFTVEKGIYQTSNFRVQP
TESIVRFPNITNLCPFGEVFNATRFASVYAWNRKRISNCVADYSVLYNSASFSTFKCYGVSPTKLNDLCFTNVYADSFVIR
GDEVRQIAPGQTGKIADYNYKLPDDFTGCVIAWNSNNLDSKVGGNYNYLYRLFRKSNLKPFERDISTEIYQAGSTPCNG
VEGFNCYFPLQSYGFQPTNGVGYQPYRVVVLSFELLHAPATVCGPKKSTNLVKNKCVNFNFNGLTGTGVLTESNKKFLP
FQQFGRDIADTTDAVRDPQTLEILDITPCSFGGVSVITPGTNTSNQVAVLYQNVNCTEVPVAIHADQLTPTWRVYSTGS
NVFQTRAGCLIGAEHVNNSYECDIPIGAGICASYQTQTNSPSRAGSVASQSIIAYTMSLGAENSVAYSNNSIAIPTNFTISV
TTEILPVSMTKTSVDCTMYICGDSTECSNLLLQYGSFCTQLNRALTGIAVEQDKNTQEVFAQVKQIYKTPPIKDFGGFNFS
QILPDPSKPSKRSFIEDLLFNKVTLADAGFIKQYGDCLGDIAARDLICAQKFNGLTVLPPLLTDEMIAQYTSALLACTITSG
WTCGAGPALQIPFAMQMAYRFNGIGVTQNVLYENQKLIANQFNSAIGKIQDSLSSTASALGKLQDVVNQNAQALNTL
VKQLSSNFGAISSVLNDILSRLDPPEAEVQIDRLITGRLQSLQTYVTQQLIRAAEIRASANLAATKMSECVLGQSKRVDFC
GKGYHLMSFPQSAPHGVVFLHVTYVPAQEKNFTTAPAICHDGKAHFPREGVFVSNGTHWFVTQRNFYEPQIITTDNTF
VSGNCDVVIGIVNNTVYDPLQPELDSFKEELDKYFKNHTSPDVDLGDISGINASVVNIQKEIDRLNEVAKNLNESLIDLQE
LGKYEQGSGYIPEAPRDGQAYVRKDGEWVLLSTFLGRSLEVLFQGPGSLPETGGGSDYKDDDDKGGGGSGGGGSGGG
GSGGGGSGGGGSHHHHHH
SEQ ID NO 144: SEQ ID NO 3 + A892P + D614N + S884C + A893C
MFVFLVLLPLVSSQCVNLTTRTQLPPAYTNSFTRGVYYPDKVFRSSVLHSTQDLFLPFFSNVTWFHAIHVSGTNGTKRFD
NPVLPFNDGVYFASTEKSNIIRGWIFGTTLDSKTQSLLIVNNATNVVIKVCEFQFCNDPFLGVYYHKNNKSWMESEFRVY
SSANNCTFEYVSQPFLMDLEGKQGNFKNLREFVFKNIDGYFKIYSKHTPINLVRDLPQGFSALEPLVDLPIGINITRFQTLL
ALHRSYLTPGDSSSGWTAGAAAYYVGYLQPRTFLLKYNENGTITDAVDCALDPLSETKCTLKSFTVEKGIYQTSNFRVQP
TESIVRFPNITNLCPFGEVFNATRFASVYAWNRKRISNCVADYSVLYNSASFSTFKCYGVSPTKLNDLCFTNVYADSFVIR
GDEVRQIAPGQTGKIADYNYKLPDDFTGCVIAWNSNNLDSKVGGNYNYLYRLFRKSNLKPFERDISTEIYQAGSTPCNG
VEGFNCYFPLQSYGFQPTNGVGYQPYRVVVLSFELLHAPATVCGPKKSTNLVKNKCVNFNFNGLTGTGVLTESNKKFLP
FQQFGRDIADTTDAVRDPQTLEILDITPCSFGGVSVITPGTNTSNQVAVLYQNVNCTEVPVAIHADQLTPTWRVYSTGS
NVFQTRAGCLIGAEHVNNSYECDIPIGAGICASYQTQTNSPSRAGSVASQSIIAYTMSLGAENSVAYSNNSIAIPTNFTISV
TTEILPVSMTKTSVDCTMYICGDSTECSNLLLQYGSFCTQLNRALTGIAVEQDKNTQEVFAQVKQIYKTPPIKDFGGFNFS
QILPDPSKPSKRSFIEDLLFNKVTLADAGFIKQYGDCLGDIAARDLICAQKFNGLTVLPPLLTDEMIAQYTSALLAGTITCG
WTFGAGPCLQIPFAMQMAYRFNGIGVTQNVLYENQKLIANQFNSAIGKIQDSLSSTASALGKLQDVVNQNAQALNTL
VKQLSSNFGAISSVLNDILSRLDPPEAEVQIDRLITGRLQSLQTYVTQQLIRAAEIRASANLAATKMSECVLGQSKRVDFC
GKGYHLMSFPQSAPHGVVFLHVTYVPAQEKNFTTAPAICHDGKAHFPREGVFVSNGTHWFVTQRNFYEPQIITTDNTF
VSGNCDVVIGIVNNTVYDPLQPELDSFKEELDKYFKNHTSPDVDLGDISGINASVVNIQKEIDRLNEVAKNLNESLIDLQE
LGKYEQGSGYIPEAPRDGQAYVRKDGEWVLLSTFLGRSLEVLFQGPGSLPETGGGSDYKDDDDKGGGGSGGGGSGGG
GSGGGGSGGGGSHHHHHH
SEQ ID NO 145: SEQ ID NO 3 + A892P + T572I + N532P
MFVFLVLLPLVSSQCVNLTTRTQLPPAYTNSFTRGVYYPDKVFRSSVLHSTQDLFLPFFSNVTWFHAIHVSGTNGTKRFD
NPVLPFNDGVYFASTEKSNIIRGWIFGTTLDSKTQSLLIVNNATNVVIKVCEFQFCNDPFLGVYYHKNNKSWMESEFRVY
SSANNCTFEYVSQPFLMDLEGKQGNFKNLREFVFKNIDGYFKIYSKHTPINLVRDLPQGFSALEPLVDLPIGINITRFQTLL
ALHRSYLTPGDSSSGWTAGAAAYYVGYLQPRTFLLKYNENGTITDAVDCALDPLSETKCTLKSFTVEKGIYQTSNFRVQP
TESIVRFPNITNLCPFGEVFNATRFASVYAWNRKRISNCVADYSVLYNSASFSTFKCYGVSPTKLNDLCFTNVYADSFVIR
GDEVRQIAPGQTGKIADYNYKLPDDFTGCVIAWNSNNLDSKVGGNYNYLYRLFRKSNLKPFERDISTEIYQAGSTPCNG
VEGFNCYFPLQSYGFQPTNGVGYQPYRVVVLSFELLHAPATVCGPKKSTPLVKNKCVNFNFNGLTGTGVLTESNKKFLP
FQQFGRDIADITDAVRDPQTLEILDITPCSFGGVSVITPGTNTSNQVAVLYQDVNCTEVPVAIHADQLTPTWRVYSTGS
NVFQTRAGCLIGAEHVNNSYECDIPIGAGICASYQTQTNSPSRAGSVASQSIIAYTMSLGAENSVAYSNNSIAIPTNFTISV
TTEILPVSMTKTSVDCTMYICGDSTECSNLLLQYGSFCTQLNRALTGIAVEQDKNTQEVFAQVKQIYKTPPIKDFGGFNFS
QILPDPSKPSKRSFIEDLLFNKVTLADAGFIKQYGDCLGDIAARDLICAQKFNGLTVLPPLLTDEMIAQYTSALLAGTITSG
WTFGAGPALQIPFAMQMAYRFNGIGVTQNVLYENQKLIANQFNSAIGKIQDSLSSTASALGKLQDVVNQNAQALNTL
VKQLSSNFGAISSVLNDILSRLDPPEAEVQIDRLITGRLQSLQTYVTQQLIRAAEIRASANLAATKMSECVLGQSKRVDFC
GKGYHLMSFPQSAPHGVVFLHVTYVPAQEKNFTTAPAICHDGKAHFPREGVFVSNGTHWFVTQRNFYEPQIITTDNTF
VSGNCDVVIGIVNNTVYDPLQPELDSFKEELDKYFKNHTSPDVDLGDISGINASVVNIQKEIDRLNEVAKNLNESLIDLQE
LGKYEQGSGYIPEAPRDGQAYVRKDGEWVLLSTFLGRSLEVLFQGPGSLPETGGGSDYKDDDDKGGGGSGGGGSGGG
GSGGGGSGGGGSHHHHHH
SEQ ID NO 146: SEQ ID NO 3 + A892P + T572I + G880C + F888C
MFVFLVLLPLVSSQCVNLTTRTQLPPAYTNSFTRGVYYPDKVFRSSVLHSTQDLFLPFFSNVTWFHAIHVSGTNGTKRFD
NPVLPFNDGVYFASTEKSNIIRGWIFGTTLDSKTQSLLIVNNATNVVIKVCEFQFCNDPFLGVYYHKNNKSWMESEFRVY
SSANNCTFEYVSQPFLMDLEGKQGNFKNLREFVFKNIDGYFKIYSKHTPINLVRDLPQGFSALEPLVDLPIGINITRFQTLL
ALHRSYLTPGDSSSGWTAGAAAYYVGYLQPRTFLLKYNENGTITDAVDCALDPLSETKCTLKSFTVEKGIYQTSNFRVQP
TESIVRFPNITNLCPFGEVFNATRFASVYAWNRKRISNCVADYSVLYNSASFSTFKCYGVSPTKLNDLCFTNVYADSFVIR
GDEVRQIAPGQTGKIADYNYKLPDDFTGCVIAWNSNNLDSKVGGNYNYLYRLFRKSNLKPFERDISTEIYQAGSTPCNG
VEGFNCYFPLQSYGFQPTNGVGYQPYRVVVLSFELLHAPATVCGPKKSTNLVKNKCVNFNFNGLTGTGVLTESNKKFLP
FQQFGRDIADITDAVRDPQTLEILDITPCSFGGVSVITPGTNTSNQVAVLYQDVNCTEVPVAIHADQLTPTWRVYSTGS
NVFQTRAGCLIGAEHVNNSYECDIPIGAGICASYQTQTNSPSRAGSVASQSIIAYTMSLGAENSVAYSNNSIAIPTNFTISV
TTEILPVSMTKTSVDCTMYICGDSTECSNLLLQYGSFCTQLNRALTGIAVEQDKNTQEVFAQVKQIYKTPPIKDFGGFNFS
QILPDPSKPSKRSFIEDLLFNKVTLADAGFIKQYGDCLGDIAARDLICAQKFNGLTVLPPLLTDEMIAQYTSALLACTITSG
WTCGAGPALQIPFAMQMAYRFNGIGVTQNVLYENQKLIANQFNSAIGKIQDSLSSTASALGKLQDVVNQNAQALNTL
VKQLSSNFGAISSVLNDILSRLDPPEAEVQIDRLITGRLQSLQTYVTQQLIRAAEIRASANLAATKMSECVLGQSKRVDFC
GKGYHLMSFPQSAPHGVVFLHVTYVPAQEKNFTTAPAICHDGKAHFPREGVFVSNGTHWFVTQRNFYEPQIITTDNTF
VSGNCDVVIGIVNNTVYDPLQPELDSFKEELDKYFKNHTSPDVDLGDISGINASVVNIQKEIDRLNEVAKNLNESLIDLQE
LGKYEQGSGYIPEAPRDGQAYVRKDGEWVLLSTFLGRSLEVLFQGPGSLPETGGGSDYKDDDDKGGGGSGGGGSGGG
GSGGGGSGGGGSHHHHHH
SEQ ID NO 147: SEQ ID NO 3 + A892P + T572I + S884C + A893C
MFVFLVLLPLVSSQCVNLTTRTQLPPAYTNSFTRGVYYPDKVFRSSVLHSTQDLFLPFFSNVTWFHAIHVSGTNGTKRFD
NPVLPFNDGVYFASTEKSNIIRGWIFGTTLDSKTQSLLIVNNATNVVIKVCEFQFCNDPFLGVYYHKNNKSWMESEFRVY
SSANNCTFEYVSQPFLMDLEGKQGNFKNLREFVFKNIDGYFKIYSKHTPINLVRDLPQGFSALEPLVDLPIGINITRFQTLL
ALHRSYLTPGDSSSGWTAGAAAYYVGYLQPRTFLLKYNENGTITDAVDCALDPLSETKCTLKSFTVEKGIYQTSNFRVQP
TESIVRFPNITNLCPFGEVFNATRFASVYAWNRKRISNCVADYSVLYNSASFSTFKCYGVSPTKLNDLCFTNVYADSFVIR
GDEVRQIAPGQTGKIADYNYKLPDDFTGCVIAWNSNNLDSKVGGNYNYLYRLFRKSNLKPFERDISTEIYQAGSTPCNG
VEGFNCYFPLQSYGFQPTNGVGYQPYRVVVLSFELLHAPATVCGPKKSTNLVKNKCVNFNFNGLTGTGVLTESNKKFLP
FQQFGRDIADITDAVRDPQTLEILDITPCSFGGVSVITPGTNTSNQVAVLYQDVNCTEVPVAIHADQLTPTWRVYSTGS
NVFQTRAGCLIGAEHVNNSYECDIPIGAGICASYQTQTNSPSRAGSVASQSIIAYTMSLGAENSVAYSNNSIAIPTNFTISV
TTEILPVSMTKTSVDCTMYICGDSTECSNLLLQYGSFCTQLNRALTGIAVEQDKNTQEVFAQVKQIYKTPPIKDFGGFNFS
QILPDPSKPSKRSFIEDLLFNKVTLADAGFIKQYGDCLGDIAARDLICAQKFNGLTVLPPLLTDEMIAQYTSALLAGTITCG
WTFGAGPCLQIPFAMQMAYRFNGIGVTQNVLYENQKLIANQFNSAIGKIQDSLSSTASALGKLQDVVNQNAQALNTL
VKQLSSNFGAISSVLNDILSRLDPPEAEVQIDRLITGRLQSLQTYVTQQLIRAAEIRASANLAATKMSECVLGQSKRVDFC
GKGYHLMSFPQSAPHGVVFLHVTYVPAQEKNFTTAPAICHDGKAHFPREGVFVSNGTHWFVTQRNFYEPQIITTDNTF
VSGNCDVVIGIVNNTVYDPLQPELDSFKEELDKYFKNHTSPDVDLGDISGINASVVNIQKEIDRLNEVAKNLNESLIDLQE
LGKYEQGSGYIPEAPRDGQAYVRKDGEWVLLSTFLGRSLEVLFQGPGSLPETGGGSDYKDDDDKGGGGSGGGGSGGG
GSGGGGSGGGGSHHHHHH
SEQ ID NO 148: SEQ ID NO 3 + A892P + N532P + G880C + F888C
MFVFLVLLPLVSSQCVNLTTRTQLPPAYTNSFTRGVYYPDKVFRSSVLHSTQDLFLPFFSNVTWFHAIHVSGTNGTKRFD
NPVLPFNDGVYFASTEKSNIIRGWIFGTTLDSKTQSLLIVNNATNVVIKVCEFQFCNDPFLGVYYHKNNKSWMESEFRVY
SSANNCTFEYVSQPFLMDLEGKQGNFKNLREFVFKNIDGYFKIYSKHTPINLVRDLPQGFSALEPLVDLPIGINITRFQTLL
ALHRSYLTPGDSSSGWTAGAAAYYVGYLQPRTFLLKYNENGTITDAVDCALDPLSETKCTLKSFTVEKGIYQTSNFRVQP
TESIVRFPNITNLCPFGEVFNATRFASVYAWNRKRISNCVADYSVLYNSASFSTFKCYGVSPTKLNDLCFTNVYADSFVIR
GDEVRQIAPGQTGKIADYNYKLPDDFTGCVIAWNSNNLDSKVGGNYNYLYRLFRKSNLKPFERDISTEIYQAGSTPCNG
VEGFNCYFPLQSYGFQPTNGVGYQPYRVVVLSFELLHAPATVCGPKKSTPLVKNKCVNFNFNGLTGTGVLTESNKKFLP
FQQFGRDIADTTDAVRDPQTLEILDITPCSFGGVSVITPGTNTSNQVAVLYQDVNCTEVPVAIHADQLTPTWRVYSTGS
NVFQTRAGCLIGAEHVNNSYECDIPIGAGICASYQTQTNSPSRAGSVASQSIIAYTMSLGAENSVAYSNNSIAIPTNFTISV
TTEILPVSMTKTSVDCTMYICGDSTECSNLLLQYGSFCTQLNRALTGIAVEQDKNTQEVFAQVKQIYKTPPIKDFGGFNFS
QILPDPSKPSKRSFIEDLLFNKVTLADAGFIKQYGDCLGDIAARDLICAQKFNGLTVLPPLLTDEMIAQYTSALLACTITSG
WTCGAGPALQIPFAMQMAYRFNGIGVTQNVLYENQKLIANQFNSAIGKIQDSLSSTASALGKLQDVVNQNAQALNTL
VKQLSSNFGAISSVLNDILSRLDPPEAEVQIDRLITGRLQSLQTYVTQQLIRAAEIRASANLAATKMSECVLGQSKRVDFC
GKGYHLMSFPQSAPHGVVFLHVTYVPAQEKNFTTAPAICHDGKAHFPREGVFVSNGTHWFVTQRNFYEPQIITTDNTF
VSGNCDVVIGIVNNTVYDPLQPELDSFKEELDKYFKNHTSPDVDLGDISGINASVVNIQKEIDRLNEVAKNLNESLIDLQE
LGKYEQGSGYIPEAPRDGQAYVRKDGEWVLLSTFLGRSLEVLFQGPGSLPETGGGSDYKDDDDKGGGGSGGGGSGGG
GSGGGGSGGGGSHHHHHH
SEQ ID NO 149: SEQ ID NO 3 + A892P + N532P + S884C + A893C
MFVFLVLLPLVSSQCVNLTTRTQLPPAYTNSFTRGVYYPDKVFRSSVLHSTQDLFLPFFSNVTWFHAIHVSGTNGTKRFD
NPVLPFNDGVYFASTEKSNIIRGWIFGTTLDSKTQSLLIVNNATNVVIKVCEFQFCNDPFLGVYYHKNNKSWMESEFRVY
SSANNCTFEYVSQPFLMDLEGKQGNFKNLREFVFKNIDGYFKIYSKHTPINLVRDLPQGFSALEPLVDLPIGINITRFQTLL
ALHRSYLTPGDSSSGWTAGAAAYYVGYLQPRTFLLKYNENGTITDAVDCALDPLSETKCTLKSFTVEKGIYQTSNFRVQP
TESIVRFPNITNLCPFGEVFNATRFASVYAWNRKRISNCVADYSVLYNSASFSTFKCYGVSPTKLNDLCFTNVYADSFVIR
GDEVRQIAPGQTGKIADYNYKLPDDFTGCVIAWNSNNLDSKVGGNYNYLYRLFRKSNLKPFERDISTEIYQAGSTPCNG
VEGFNCYFPLQSYGFQPTNGVGYQPYRVVVLSFELLHAPATVCGPKKSTPLVKNKCVNFNFNGLTGTGVLTESNKKFLP
FQQFGRDIADTTDAVRDPQTLEILDITPCSFGGVSVITPGTNTSNQVAVLYQDVNCTEVPVAIHADQLTPTWRVYSTGS
NVFQTRAGCLIGAEHVNNSYECDIPIGAGICASYQTQTNSPSRAGSVASQSIIAYTMSLGAENSVAYSNNSIAIPTNFTISV
TTEILPVSMTKTSVDCTMYICGDSTECSNLLLQYGSFCTQLNRALTGIAVEQDKNTQEVFAQVKQIYKTPPIKDFGGFNFS
QILPDPSKPSKRSFIEDLLFNKVTLADAGFIKQYGDCLGDIAARDLICAQKFNGLTVLPPLLTDEMIAQYTSALLAGTITCG
WTFGAGPCLQIPFAMQMAYRFNGIGVTQNVLYENQKLIANQFNSAIGKIQDSLSSTASALGKLQDVVNQNAQALNTL
VKQLSSNFGAISSVLNDILSRLDPPEAEVQIDRLITGRLQSLQTYVTQQLIRAAEIRASANLAATKMSECVLGQSKRVDFC
GKGYHLMSFPQSAPHGVVFLHVTYVPAQEKNFTTAPAICHDGKAHFPREGVFVSNGTHWFVTQRNFYEPQIITTDNTF
VSGNCDVVIGIVNNTVYDPLQPELDSFKEELDKYFKNHTSPDVDLGDISGINASVVNIQKEIDRLNEVAKNLNESLIDLQE
LGKYEQGSGYIPEAPRDGQAYVRKDGEWVLLSTFLGRSLEVLFQGPGSLPETGGGSDYKDDDDKGGGGSGGGGSGGG
GSGGGGSGGGGSHHHHHH
SEQ ID NO 150: SEQ ID NO 3 + D614N + T572I + N532P
MFVFLVLLPLVSSQCVNLTTRTQLPPAYTNSFTRGVYYPDKVFRSSVLHSTQDLFLPFFSNVTWFHAIHVSGTNGTKRFD
NPVLPFNDGVYFASTEKSNIIRGWIFGTTLDSKTQSLLIVNNATNVVIKVCEFQFCNDPFLGVYYHKNNKSWMESEFRVY
SSANNCTFEYVSQPFLMDLEGKQGNFKNLREFVFKNIDGYFKIYSKHTPINLVRDLPQGFSALEPLVDLPIGINITRFQTLL
ALHRSYLTPGDSSSGWTAGAAAYYVGYLQPRTFLLKYNENGTITDAVDCALDPLSETKCTLKSFTVEKGIYQTSNFRVQP
TESIVRFPNITNLCPFGEVFNATRFASVYAWNRKRISNCVADYSVLYNSASFSTFKCYGVSPTKLNDLCFTNVYADSFVIR
GDEVRQIAPGQTGKIADYNYKLPDDFTGCVIAWNSNNLDSKVGGNYNYLYRLFRKSNLKPFERDISTEIYQAGSTPCNG
VEGFNCYFPLQSYGFQPTNGVGYQPYRVVVLSFELLHAPATVCGPKKSTPLVKNKCVNFNFNGLTGTGVLTESNKKFLP
FQQFGRDIADITDAVRDPQTLEILDITPCSFGGVSVITPGTNTSNQVAVLYQNVNCTEVPVAIHADQLTPTWRVYSTGS
NVFQTRAGCLIGAEHVNNSYECDIPIGAGICASYQTQTNSPSRAGSVASQSIIAYTMSLGAENSVAYSNNSIAIPTNFTISV
TTEILPVSMTKTSVDCTMYICGDSTECSNLLLQYGSFCTQLNRALTGIAVEQDKNTQEVFAQVKQIYKTPPIKDFGGFNFS
QILPDPSKPSKRSFIEDLLFNKVTLADAGFIKQYGDCLGDIAARDLICAQKFNGLTVLPPLLTDEMIAQYTSALLAGTITSG
WTFGAGAALQIPFAMQMAYRFNGIGVTQNVLYENQKLIANQFNSAIGKIQDSLSSTASALGKLQDVVNQNAQALNTL
VKQLSSNFGAISSVLNDILSRLDPPEAEVQIDRLITGRLQSLQTYVTQQLIRAAEIRASANLAATKMSECVLGQSKRVDFC
GKGYHLMSFPQSAPHGVVFLHVTYVPAQEKNFTTAPAICHDGKAHFPREGVFVSNGTHWFVTQRNFYEPQIITTDNTF
VSGNCDVVIGIVNNTVYDPLQPELDSFKEELDKYFKNHTSPDVDLGDISGINASVVNIQKEIDRLNEVAKNLNESLIDLQE
LGKYEQGSGYIPEAPRDGQAYVRKDGEWVLLSTFLGRSLEVLFQGPGSLPETGGGSDYKDDDDKGGGGSGGGGSGGG
GSGGGGSGGGGSHHHHHH
SEQ ID NO 151: SEQ ID NO 3 + D614N + T572I + G880C + F888C
MFVFLVLLPLVSSQCVNLTTRTQLPPAYTNSFTRGVYYPDKVFRSSVLHSTQDLFLPFFSNVTWFHAIHVSGTNGTKRFD
NPVLPFNDGVYFASTEKSNIIRGWIFGTTLDSKTQSLLIVNNATNVVIKVCEFQFCNDPFLGVYYHKNNKSWMESEFRVY
SSANNCTFEYVSQPFLMDLEGKQGNFKNLREFVFKNIDGYFKIYSKHTPINLVRDLPQGFSALEPLVDLPIGINITRFQTLL
ALHRSYLTPGDSSSGWTAGAAAYYVGYLQPRTFLLKYNENGTITDAVDCALDPLSETKCTLKSFTVEKGIYQTSNFRVQP
TESIVRFPNITNLCPFGEVFNATRFASVYAWNRKRISNCVADYSVLYNSASFSTFKCYGVSPTKLNDLCFTNVYADSFVIR
GDEVRQIAPGQTGKIADYNYKLPDDFTGCVIAWNSNNLDSKVGGNYNYLYRLFRKSNLKPFERDISTEIYQAGSTPCNG
VEGFNCYFPLQSYGFQPTNGVGYQPYRVVVLSFELLHAPATVCGPKKSTNLVKNKCVNFNFNGLTGTGVLTESNKKFLP
FQQFGRDIADITDAVRDPQTLEILDITPCSFGGVSVITPGTNTSNQVAVLYQNVNCTEVPVAIHADQLTPTWRVYSTGS
NVFQTRAGCLIGAEHVNNSYECDIPIGAGICASYQTQTNSPSRAGSVASQSIIAYTMSLGAENSVAYSNNSIAIPTNFTISV
TTEILPVSMTKTSVDCTMYICGDSTECSNLLLQYGSFCTQLNRALTGIAVEQDKNTQEVFAQVKQIYKTPPIKDFGGFNFS
QILPDPSKPSKRSFIEDLLFNKVTLADAGFIKQYGDCLGDIAARDLICAQKFNGLTVLPPLLTDEMIAQYTSALLACTITSG
WTCGAGAALQIPFAMQMAYRFNGIGVTQNVLYENQKLIANQFNSAIGKIQDSLSSTASALGKLQDVVNQNAQALNTL
VKQLSSNFGAISSVLNDILSRLDPPEAEVQIDRLITGRLQSLQTYVTQQLIRAAEIRASANLAATKMSECVLGQSKRVDFC
GKGYHLMSFPQSAPHGVVFLHVTYVPAQEKNFTTAPAICHDGKAHFPREGVFVSNGTHWFVTQRNFYEPQIITTDNTF
VSGNCDVVIGIVNNTVYDPLQPELDSFKEELDKYFKNHTSPDVDLGDISGINASVVNIQKEIDRLNEVAKNLNESLIDLQE
LGKYEQGSGYIPEAPRDGQAYVRKDGEWVLLSTFLGRSLEVLFQGPGSLPETGGGSDYKDDDDKGGGGSGGGGSGGG
GSGGGGSGGGGSHHHHHH
SEQ ID NO 152: SEQ ID NO 3 + D614N + T572I + S884C + A893C
MFVFLVLLPLVSSQCVNLTTRTQLPPAYTNSFTRGVYYPDKVFRSSVLHSTQDLFLPFFSNVTWFHAIHVSGTNGTKRFD
NPVLPFNDGVYFASTEKSNIIRGWIFGTTLDSKTQSLLIVNNATNVVIKVCEFQFCNDPFLGVYYHKNNKSWMESEFRVY
SSANNCTFEYVSQPFLMDLEGKQGNFKNLREFVFKNIDGYFKIYSKHTPINLVRDLPQGFSALEPLVDLPIGINITRFQTLL
ALHRSYLTPGDSSSGWTAGAAAYYVGYLQPRTFLLKYNENGTITDAVDCALDPLSETKCTLKSFTVEKGIYQTSNFRVQP
TESIVRFPNITNLCPFGEVFNATRFASVYAWNRKRISNCVADYSVLYNSASFSTFKCYGVSPTKLNDLCFTNVYADSFVIR
GDEVRQIAPGQTGKIADYNYKLPDDFTGCVIAWNSNNLDSKVGGNYNYLYRLFRKSNLKPFERDISTEIYQAGSTPCNG
VEGFNCYFPLQSYGFQPTNGVGYQPYRVVVLSFELLHAPATVCGPKKSTNLVKNKCVNFNFNGLTGTGVLTESNKKFLP
FQQFGRDIADITDAVRDPQTLEILDITPCSFGGVSVITPGTNTSNQVAVLYQNVNCTEVPVAIHADQLTPTWRVYSTGS
NVFQTRAGCLIGAEHVNNSYECDIPIGAGICASYQTQTNSPSRAGSVASQSIIAYTMSLGAENSVAYSNNSIAIPTNFTISV
TTEILPVSMTKTSVDCTMYICGDSTECSNLLLQYGSFCTQLNRALTGIAVEQDKNTQEVFAQVKQIYKTPPIKDFGGFNFS
QILPDPSKPSKRSFIEDLLFNKVTLADAGFIKQYGDCLGDIAARDLICAQKFNGLTVLPPLLTDEMIAQYTSALLAGTITCG
WTFGAGACLQIPFAMQMAYRFNGIGVTQNVLYENQKLIANQFNSAIGKIQDSLSSTASALGKLQDVVNQNAQALNTL
VKQLSSNFGAISSVLNDILSRLDPPEAEVQIDRLITGRLQSLQTYVTQQLIRAAEIRASANLAATKMSECVLGQSKRVDFC
GKGYHLMSFPQSAPHGVVFLHVTYVPAQEKNFTTAPAICHDGKAHFPREGVFVSNGTHWFVTQRNFYEPQIITTDNTF
VSGNCDVVIGIVNNTVYDPLQPELDSFKEELDKYFKNHTSPDVDLGDISGINASVVNIQKEIDRLNEVAKNLNESLIDLQE
LGKYEQGSGYIPEAPRDGQAYVRKDGEWVLLSTFLGRSLEVLFQGPGSLPETGGGSDYKDDDDKGGGGSGGGGSGGG
GSGGGGSGGGGSHHHHHH
SEQ ID NO 153: SEQ ID NO 3 + D614N + N532P + G880C + F888C
MFVFLVLLPLVSSQCVNLTTRTQLPPAYTNSFTRGVYYPDKVFRSSVLHSTQDLFLPFFSNVTWFHAIHVSGTNGTKRFD
NPVLPFNDGVYFASTEKSNIIRGWIFGTTLDSKTQSLLIVNNATNVVIKVCEFQFCNDPFLGVYYHKNNKSWMESEFRVY
SSANNCTFEYVSQPFLMDLEGKQGNFKNLREFVFKNIDGYFKIYSKHTPINLVRDLPQGFSALEPLVDLPIGINITRFQTLL
ALHRSYLTPGDSSSGWTAGAAAYYVGYLQPRTFLLKYNENGTITDAVDCALDPLSETKCTLKSFTVEKGIYQTSNFRVQP
TESIVRFPNITNLCPFGEVFNATRFASVYAWNRKRISNCVADYSVLYNSASFSTFKCYGVSPTKLNDLCFTNVYADSFVIR
GDEVRQIAPGQTGKIADYNYKLPDDFTGCVIAWNSNNLDSKVGGNYNYLYRLFRKSNLKPFERDISTEIYQAGSTPCNG
VEGFNCYFPLQSYGFQPTNGVGYQPYRVVVLSFELLHAPATVCGPKKSTPLVKNKCVNFNFNGLTGTGVLTESNKKFLP
FQQFGRDIADTTDAVRDPQTLEILDITPCSFGGVSVITPGTNTSNQVAVLYQNVNCTEVPVAIHADQLTPTWRVYSTGS
NVFQTRAGCLIGAEHVNNSYECDIPIGAGICASYQTQTNSPSRAGSVASQSIIAYTMSLGAENSVAYSNNSIAIPTNFTISV
TTEILPVSMTKTSVDCTMYICGDSTECSNLLLQYGSFCTQLNRALTGIAVEQDKNTQEVFAQVKQIYKTPPIKDFGGFNFS
QILPDPSKPSKRSFIEDLLFNKVTLADAGFIKQYGDCLGDIAARDLICAQKFNGLTVLPPLLTDEMIAQYTSALLACTITSG
WTCGAGAALQIPFAMQMAYRFNGIGVTQNVLYENQKLIANQFNSAIGKIQDSLSSTASALGKLQDVVNQNAQALNTL
VKQLSSNFGAISSVLNDILSRLDPPEAEVQIDRLITGRLQSLQTYVTQQLIRAAEIRASANLAATKMSECVLGQSKRVDFC
GKGYHLMSFPQSAPHGVVFLHVTYVPAQEKNFTTAPAICHDGKAHFPREGVFVSNGTHWFVTQRNFYEPQIITTDNTF
VSGNCDVVIGIVNNTVYDPLQPELDSFKEELDKYFKNHTSPDVDLGDISGINASVVNIQKEIDRLNEVAKNLNESLIDLQE
LGKYEQGSGYIPEAPRDGQAYVRKDGEWVLLSTFLGRSLEVLFQGPGSLPETGGGSDYKDDDDKGGGGSGGGGSGGG
GSGGGGSGGGGSHHHHHH
SEQ ID NO 154: SEQ ID NO 3 + D614N + N532P + S884C + A893C
MFVFLVLLPLVSSQCVNLTTRTQLPPAYTNSFTRGVYYPDKVFRSSVLHSTQDLFLPFFSNVTWFHAIHVSGTNGTKRFD
NPVLPFNDGVYFASTEKSNIIRGWIFGTTLDSKTQSLLIVNNATNVVIKVCEFQFCNDPFLGVYYHKNNKSWMESEFRVY
SSANNCTFEYVSQPFLMDLEGKQGNFKNLREFVFKNIDGYFKIYSKHTPINLVRDLPQGFSALEPLVDLPIGINITRFQTLL
ALHRSYLTPGDSSSGWTAGAAAYYVGYLQPRTFLLKYNENGTITDAVDCALDPLSETKCTLKSFTVEKGIYQTSNFRVQP
TESIVRFPNITNLCPFGEVFNATRFASVYAWNRKRISNCVADYSVLYNSASFSTFKCYGVSPTKLNDLCFTNVYADSFVIR
GDEVRQIAPGQTGKIADYNYKLPDDFTGCVIAWNSNNLDSKVGGNYNYLYRLFRKSNLKPFERDISTEIYQAGSTPCNG
VEGFNCYFPLQSYGFQPTNGVGYQPYRVVVLSFELLHAPATVCGPKKSTPLVKNKCVNFNFNGLTGTGVLTESNKKFLP
FQQFGRDIADTTDAVRDPQTLEILDITPCSFGGVSVITPGTNTSNQVAVLYQNVNCTEVPVAIHADQLTPTWRVYSTGS
NVFQTRAGCLIGAEHVNNSYECDIPIGAGICASYQTQTNSPSRAGSVASQSIIAYTMSLGAENSVAYSNNSIAIPTNFTISV
TTEILPVSMTKTSVDCTMYICGDSTECSNLLLQYGSFCTQLNRALTGIAVEQDKNTQEVFAQVKQIYKTPPIKDFGGFNFS
QILPDPSKPSKRSFIEDLLFNKVTLADAGFIKQYGDCLGDIAARDLICAQKFNGLTVLPPLLTDEMIAQYTSALLAGTITCG
WTFGAGACLQIPFAMQMAYRFNGIGVTQNVLYENQKLIANQFNSAIGKIQDSLSSTASALGKLQDVVNQNAQALNTL
VKQLSSNFGAISSVLNDILSRLDPPEAEVQIDRLITGRLQSLQTYVTQQLIRAAEIRASANLAATKMSECVLGQSKRVDFC
GKGYHLMSFPQSAPHGVVFLHVTYVPAQEKNFTTAPAICHDGKAHFPREGVFVSNGTHWFVTQRNFYEPQIITTDNTF
VSGNCDVVIGIVNNTVYDPLQPELDSFKEELDKYFKNHTSPDVDLGDISGINASVVNIQKEIDRLNEVAKNLNESLIDLQE
LGKYEQGSGYIPEAPRDGQAYVRKDGEWVLLSTFLGRSLEVLFQGPGSLPETGGGSDYKDDDDKGGGGSGGGGSGGG
GSGGGGSGGGGSHHHHHH
SEQ ID NO 155: SEQ ID NO 3 + T572I + N532P + G880C + F888C
MFVFLVLLPLVSSQCVNLTTRTQLPPAYTNSFTRGVYYPDKVFRSSVLHSTQDLFLPFFSNVTWFHAIHVSGTNGTKRFD
NPVLPFNDGVYFASTEKSNIIRGWIFGTTLDSKTQSLLIVNNATNVVIKVCEFQFCNDPFLGVYYHKNNKSWMESEFRVY
SSANNCTFEYVSQPFLMDLEGKQGNFKNLREFVFKNIDGYFKIYSKHTPINLVRDLPQGFSALEPLVDLPIGINITRFQTLL
ALHRSYLTPGDSSSGWTAGAAAYYVGYLQPRTFLLKYNENGTITDAVDCALDPLSETKCTLKSFTVEKGIYQTSNFRVQP
TESIVRFPNITNLCPFGEVFNATRFASVYAWNRKRISNCVADYSVLYNSASFSTFKCYGVSPTKLNDLCFTNVYADSFVIR
GDEVRQIAPGQTGKIADYNYKLPDDFTGCVIAWNSNNLDSKVGGNYNYLYRLFRKSNLKPFERDISTEIYQAGSTPCNG
VEGFNCYFPLQSYGFQPTNGVGYQPYRVVVLSFELLHAPATVCGPKKSTPLVKNKCVNFNFNGLTGTGVLTESNKKFLP
FQQFGRDIADITDAVRDPQTLEILDITPCSFGGVSVITPGTNTSNQVAVLYQDVNCTEVPVAIHADQLTPTWRVYSTGS
NVFQTRAGCLIGAEHVNNSYECDIPIGAGICASYQTQTNSPSRAGSVASQSIIAYTMSLGAENSVAYSNNSIAIPTNFTISV
TTEILPVSMTKTSVDCTMYICGDSTECSNLLLQYGSFCTQLNRALTGIAVEQDKNTQEVFAQVKQIYKTPPIKDFGGFNFS
QILPDPSKPSKRSFIEDLLFNKVTLADAGFIKQYGDCLGDIAARDLICAQKFNGLTVLPPLLTDEMIAQYTSALLACTITSG
WTCGAGAALQIPFAMQMAYRFNGIGVTQNVLYENQKLIANQFNSAIGKIQDSLSSTASALGKLQDVVNQNAQALNTL
VKQLSSNFGAISSVLNDILSRLDPPEAEVQIDRLITGRLQSLQTYVTQQLIRAAEIRASANLAATKMSECVLGQSKRVDFC
GKGYHLMSFPQSAPHGVVFLHVTYVPAQEKNFTTAPAICHDGKAHFPREGVFVSNGTHWFVTQRNFYEPQIITTDNTF
VSGNCDVVIGIVNNTVYDPLQPELDSFKEELDKYFKNHTSPDVDLGDISGINASVVNIQKEIDRLNEVAKNLNESLIDLQE
LGKYEQGSGYIPEAPRDGQAYVRKDGEWVLLSTFLGRSLEVLFQGPGSLPETGGGSDYKDDDDKGGGGSGGGGSGGG
GSGGGGSGGGGSHHHHHH
SEQ ID NO 156: SEQ ID NO 3 + T572I + N532P + S884C + A893C
MFVFLVLLPLVSSQCVNLTTRTQLPPAYTNSFTRGVYYPDKVFRSSVLHSTQDLFLPFFSNVTWFHAIHVSGTNGTKRFD
NPVLPFNDGVYFASTEKSNIIRGWIFGTTLDSKTQSLLIVNNATNVVIKVCEFQFCNDPFLGVYYHKNNKSWMESEFRVY
SSANNCTFEYVSQPFLMDLEGKQGNFKNLREFVFKNIDGYFKIYSKHTPINLVRDLPQGFSALEPLVDLPIGINITRFQTLL
ALHRSYLTPGDSSSGWTAGAAAYYVGYLQPRTFLLKYNENGTITDAVDCALDPLSETKCTLKSFTVEKGIYQTSNFRVQP
TESIVRFPNITNLCPFGEVFNATRFASVYAWNRKRISNCVADYSVLYNSASFSTFKCYGVSPTKLNDLCFTNVYADSFVIR
GDEVRQIAPGQTGKIADYNYKLPDDFTGCVIAWNSNNLDSKVGGNYNYLYRLFRKSNLKPFERDISTEIYQAGSTPCNG
VEGFNCYFPLQSYGFQPTNGVGYQPYRVVVLSFELLHAPATVCGPKKSTPLVKNKCVNFNFNGLTGTGVLTESNKKFLP
FQQFGRDIADITDAVRDPQTLEILDITPCSFGGVSVITPGTNTSNQVAVLYQDVNCTEVPVAIHADQLTPTWRVYSTGS
NVFQTRAGCLIGAEHVNNSYECDIPIGAGICASYQTQTNSPSRAGSVASQSIIAYTMSLGAENSVAYSNNSIAIPTNFTISV
TTEILPVSMTKTSVDCTMYICGDSTECSNLLLQYGSFCTQLNRALTGIAVEQDKNTQEVFAQVKQIYKTPPIKDFGGFNFS
QILPDPSKPSKRSFIEDLLFNKVTLADAGFIKQYGDCLGDIAARDLICAQKFNGLTVLPPLLTDEMIAQYTSALLAGTITCG
WTFGAGACLQIPFAMQMAYRFNGIGVTQNVLYENQKLIANQFNSAIGKIQDSLSSTASALGKLQDVVNQNAQALNTL
VKQLSSNFGAISSVLNDILSRLDPPEAEVQIDRLITGRLQSLQTYVTQQLIRAAEIRASANLAATKMSECVLGQSKRVDFC
GKGYHLMSFPQSAPHGVVFLHVTYVPAQEKNFTTAPAICHDGKAHFPREGVFVSNGTHWFVTQRNFYEPQIITTDNTF
VSGNCDVVIGIVNNTVYDPLQPELDSFKEELDKYFKNHTSPDVDLGDISGINASVVNIQKEIDRLNEVAKNLNESLIDLQE
LGKYEQGSGYIPEAPRDGQAYVRKDGEWVLLSTFLGRSLEVLFQGPGSLPETGGGSDYKDDDDKGGGGSGGGGSGGG
GSGGGGSGGGGSHHHHHH
SEQ ID NO 157: SEQ ID NO 3 + A942P + A892P + D614N + T572I
MFVFLVLLPLVSSQCVNLTTRTQLPPAYTNSFTRGVYYPDKVFRSSVLHSTQDLFLPFFSNVTWFHAIHVSGTNGTKRFD
NPVLPFNDGVYFASTEKSNIIRGWIFGTTLDSKTQSLLIVNNATNVVIKVCEFQFCNDPFLGVYYHKNNKSWMESEFRVY
SSANNCTFEYVSQPFLMDLEGKQGNFKNLREFVFKNIDGYFKIYSKHTPINLVRDLPQGFSALEPLVDLPIGINITRFQTLL
ALHRSYLTPGDSSSGWTAGAAAYYVGYLQPRTFLLKYNENGTITDAVDCALDPLSETKCTLKSFTVEKGIYQTSNFRVQP
TESIVRFPNITNLCPFGEVFNATRFASVYAWNRKRISNCVADYSVLYNSASFSTFKCYGVSPTKLNDLCFTNVYADSFVIR
GDEVRQIAPGQTGKIADYNYKLPDDFTGCVIAWNSNNLDSKVGGNYNYLYRLFRKSNLKPFERDISTEIYQAGSTPCNG
VEGFNCYFPLQSYGFQPTNGVGYQPYRVVVLSFELLHAPATVCGPKKSTNLVKNKCVNFNFNGLTGTGVLTESNKKFLP
FQQFGRDIADITDAVRDPQTLEILDITPCSFGGVSVITPGTNTSNQVAVLYQNVNCTEVPVAIHADQLTPTWRVYSTGS
NVFQTRAGCLIGAEHVNNSYECDIPIGAGICASYQTQTNSPSRAGSVASQSIIAYTMSLGAENSVAYSNNSIAIPTNFTISV
TTEILPVSMTKTSVDCTMYICGDSTECSNLLLQYGSFCTQLNRALTGIAVEQDKNTQEVFAQVKQIYKTPPIKDFGGFNFS
QILPDPSKPSKRSFIEDLLFNKVTLADAGFIKQYGDCLGDIAARDLICAQKFNGLTVLPPLLTDEMIAQYTSALLAGTITSG
WTFGAGPALQIPFAMQMAYRFNGIGVTQNVLYENQKLIANQFNSAIGKIQDSLSSTPSALGKLQDVVNQNAQALNTL
VKQLSSNFGAISSVLNDILSRLDPPEAEVQIDRLITGRLQSLQTYVTQQLIRAAEIRASANLAATKMSECVLGQSKRVDFC
GKGYHLMSFPQSAPHGVVFLHVTYVPAQEKNFTTAPAICHDGKAHFPREGVFVSNGTHWFVTQRNFYEPQIITTDNTF
VSGNCDVVIGIVNNTVYDPLQPELDSFKEELDKYFKNHTSPDVDLGDISGINASVVNIQKEIDRLNEVAKNLNESLIDLQE
LGKYEQGSGYIPEAPRDGQAYVRKDGEWVLLSTFLGRSLEVLFQGPGSLPETGGGSDYKDDDDKGGGGSGGGGSGGG
GSGGGGSGGGGSHHHHHH
SEQ ID NO 158: SEQ ID NO 3 + A942P + A892P + D614N + N532P
MFVFLVLLPLVSSQCVNLTTRTQLPPAYTNSFTRGVYYPDKVFRSSVLHSTQDLFLPFFSNVTWFHAIHVSGTNGTKRFD
NPVLPFNDGVYFASTEKSNIIRGWIFGTTLDSKTQSLLIVNNATNVVIKVCEFQFCNDPFLGVYYHKNNKSWMESEFRVY
SSANNCTFEYVSQPFLMDLEGKQGNFKNLREFVFKNIDGYFKIYSKHTPINLVRDLPQGFSALEPLVDLPIGINITRFQTLL
ALHRSYLTPGDSSSGWTAGAAAYYVGYLQPRTFLLKYNENGTITDAVDCALDPLSETKCTLKSFTVEKGIYQTSNFRVQP
TESIVRFPNITNLCPFGEVFNATRFASVYAWNRKRISNCVADYSVLYNSASFSTFKCYGVSPTKLNDLCFTNVYADSFVIR
GDEVRQIAPGQTGKIADYNYKLPDDFTGCVIAWNSNNLDSKVGGNYNYLYRLFRKSNLKPFERDISTEIYQAGSTPCNG
VEGFNCYFPLQSYGFQPTNGVGYQPYRVVVLSFELLHAPATVCGPKKSTPLVKNKCVNFNFNGLTGTGVLTESNKKFLP
FQQFGRDIADTTDAVRDPQTLEILDITPCSFGGVSVITPGTNTSNQVAVLYQNVNCTEVPVAIHADQLTPTWRVYSTGS
NVFQTRAGCLIGAEHVNNSYECDIPIGAGICASYQTQTNSPSRAGSVASQSIIAYTMSLGAENSVAYSNNSIAIPTNFTISV
TTEILPVSMTKTSVDCTMYICGDSTECSNLLLQYGSFCTQLNRALTGIAVEQDKNTQEVFAQVKQIYKTPPIKDFGGFNFS
QILPDPSKPSKRSFIEDLLFNKVTLADAGFIKQYGDCLGDIAARDLICAQKFNGLTVLPPLLTDEMIAQYTSALLAGTITSG
WTFGAGPALQIPFAMQMAYRFNGIGVTQNVLYENQKLIANQFNSAIGKIQDSLSSTPSALGKLQDVVNQNAQALNTL
VKQLSSNFGAISSVLNDILSRLDPPEAEVQIDRLITGRLQSLQTYVTQQLIRAAEIRASANLAATKMSECVLGQSKRVDFC
GKGYHLMSFPQSAPHGVVFLHVTYVPAQEKNFTTAPAICHDGKAHFPREGVFVSNGTHWFVTQRNFYEPQIITTDNTF
VSGNCDVVIGIVNNTVYDPLQPELDSFKEELDKYFKNHTSPDVDLGDISGINASVVNIQKEIDRLNEVAKNLNESLIDLQE
LGKYEQGSGYIPEAPRDGQAYVRKDGEWVLLSTFLGRSLEVLFQGPGSLPETGGGSDYKDDDDKGGGGSGGGGSGGG
GSGGGGSGGGGSHHHHHH
SEQ ID NO 159: SEQ ID NO 3 + A942P + A892P + D614N + G880C + F888C
MFVFLVLLPLVSSQCVNLTTRTQLPPAYTNSFTRGVYYPDKVFRSSVLHSTQDLFLPFFSNVTWFHAIHVSGTNGTKRFD
NPVLPFNDGVYFASTEKSNIIRGWIFGTTLDSKTQSLLIVNNATNVVIKVCEFQFCNDPFLGVYYHKNNKSWMESEFRVY
SSANNCTFEYVSQPFLMDLEGKQGNFKNLREFVFKNIDGYFKIYSKHTPINLVRDLPQGFSALEPLVDLPIGINITRFQTLL
ALHRSYLTPGDSSSGWTAGAAAYYVGYLQPRTFLLKYNENGTITDAVDCALDPLSETKCTLKSFTVEKGIYQTSNFRVQP
TESIVRFPNITNLCPFGEVFNATRFASVYAWNRKRISNCVADYSVLYNSASFSTFKCYGVSPTKLNDLCFTNVYADSFVIR
GDEVRQIAPGQTGKIADYNYKLPDDFTGCVIAWNSNNLDSKVGGNYNYLYRLFRKSNLKPFERDISTEIYQAGSTPCNG
VEGFNCYFPLQSYGFQPTNGVGYQPYRVVVLSFELLHAPATVCGPKKSTNLVKNKCVNFNFNGLTGTGVLTESNKKFLP
FQQFGRDIADTTDAVRDPQTLEILDITPCSFGGVSVITPGTNTSNQVAVLYQNVNCTEVPVAIHADQLTPTWRVYSTGS
NVFQTRAGCLIGAEHVNNSYECDIPIGAGICASYQTQTNSPSRAGSVASQSIIAYTMSLGAENSVAYSNNSIAIPTNFTISV
TTEILPVSMTKTSVDCTMYICGDSTECSNLLLQYGSFCTQLNRALTGIAVEQDKNTQEVFAQVKQIYKTPPIKDFGGFNFS
QILPDPSKPSKRSFIEDLLFNKVTLADAGFIKQYGDCLGDIAARDLICAQKFNGLTVLPPLLTDEMIAQYTSALLACTITSG
WTCGAGPALQIPFAMQMAYRFNGIGVTQNVLYENQKLIANQFNSAIGKIQDSLSSTPSALGKLQDVVNQNAQALNTL
VKQLSSNFGAISSVLNDILSRLDPPEAEVQIDRLITGRLQSLQTYVTQQLIRAAEIRASANLAATKMSECVLGQSKRVDFC
GKGYHLMSFPQSAPHGVVFLHVTYVPAQEKNFTTAPAICHDGKAHFPREGVFVSNGTHWFVTQRNFYEPQIITTDNTF
VSGNCDVVIGIVNNTVYDPLQPELDSFKEELDKYFKNHTSPDVDLGDISGINASVVNIQKEIDRLNEVAKNLNESLIDLQE
LGKYEQGSGYIPEAPRDGQAYVRKDGEWVLLSTFLGRSLEVLFQGPGSLPETGGGSDYKDDDDKGGGGSGGGGSGGG
GSGGGGSGGGGSHHHHHH
SEQ ID NO 160: SEQ ID NO 3 + A942P + A892P + D614N + S884C + A893C
MFVFLVLLPLVSSQCVNLTTRTQLPPAYTNSFTRGVYYPDKVFRSSVLHSTQDLFLPFFSNVTWFHAIHVSGTNGTKRFD
NPVLPFNDGVYFASTEKSNIIRGWIFGTTLDSKTQSLLIVNNATNVVIKVCEFQFCNDPFLGVYYHKNNKSWMESEFRVY
SSANNCTFEYVSQPFLMDLEGKQGNFKNLREFVFKNIDGYFKIYSKHTPINLVRDLPQGFSALEPLVDLPIGINITRFQTLL
ALHRSYLTPGDSSSGWTAGAAAYYVGYLQPRTFLLKYNENGTITDAVDCALDPLSETKCTLKSFTVEKGIYQTSNFRVQP
TESIVRFPNITNLCPFGEVFNATRFASVYAWNRKRISNCVADYSVLYNSASFSTFKCYGVSPTKLNDLCFTNVYADSFVIR
GDEVRQIAPGQTGKIADYNYKLPDDFTGCVIAWNSNNLDSKVGGNYNYLYRLFRKSNLKPFERDISTEIYQAGSTPCNG
VEGFNCYFPLQSYGFQPTNGVGYQPYRVVVLSFELLHAPATVCGPKKSTNLVKNKCVNFNFNGLTGTGVLTESNKKFLP
FQQFGRDIADTTDAVRDPQTLEILDITPCSFGGVSVITPGTNTSNQVAVLYQNVNCTEVPVAIHADQLTPTWRVYSTGS
NVFQTRAGCLIGAEHVNNSYECDIPIGAGICASYQTQTNSPSRAGSVASQSIIAYTMSLGAENSVAYSNNSIAIPTNFTISV
TTEILPVSMTKTSVDCTMYICGDSTECSNLLLQYGSFCTQLNRALTGIAVEQDKNTQEVFAQVKQIYKTPPIKDFGGFNFS
QILPDPSKPSKRSFIEDLLFNKVTLADAGFIKQYGDCLGDIAARDLICAQKFNGLTVLPPLLTDEMIAQYTSALLAGTITCG
WTFGAGPCLQIPFAMQMAYRFNGIGVTQNVLYENQKLIANQFNSAIGKIQDSLSSTPSALGKLQDVVNQNAQALNTL
VKQLSSNFGAISSVLNDILSRLDPPEAEVQIDRLITGRLQSLQTYVTQQLIRAAEIRASANLAATKMSECVLGQSKRVDFC
GKGYHLMSFPQSAPHGVVFLHVTYVPAQEKNFTTAPAICHDGKAHFPREGVFVSNGTHWFVTQRNFYEPQIITTDNTF
VSGNCDVVIGIVNNTVYDPLQPELDSFKEELDKYFKNHTSPDVDLGDISGINASVVNIQKEIDRLNEVAKNLNESLIDLQE
LGKYEQGSGYIPEAPRDGQAYVRKDGEWVLLSTFLGRSLEVLFQGPGSLPETGGGSDYKDDDDKGGGGSGGGGSGGG
GSGGGGSGGGGSHHHHHH
SEQ ID NO 161: SEQ ID NO 3 + A942P + A892P + T572I + N532P
MFVFLVLLPLVSSQCVNLTTRTQLPPAYTNSFTRGVYYPDKVFRSSVLHSTQDLFLPFFSNVTWFHAIHVSGTNGTKRFD
NPVLPFNDGVYFASTEKSNIIRGWIFGTTLDSKTQSLLIVNNATNVVIKVCEFQFCNDPFLGVYYHKNNKSWMESEFRVY
SSANNCTFEYVSQPFLMDLEGKQGNFKNLREFVFKNIDGYFKIYSKHTPINLVRDLPQGFSALEPLVDLPIGINITRFQTLL
ALHRSYLTPGDSSSGWTAGAAAYYVGYLQPRTFLLKYNENGTITDAVDCALDPLSETKCTLKSFTVEKGIYQTSNFRVQP
TESIVRFPNITNLCPFGEVFNATRFASVYAWNRKRISNCVADYSVLYNSASFSTFKCYGVSPTKLNDLCFTNVYADSFVIR
GDEVRQIAPGQTGKIADYNYKLPDDFTGCVIAWNSNNLDSKVGGNYNYLYRLFRKSNLKPFERDISTEIYQAGSTPCNG
VEGFNCYFPLQSYGFQPTNGVGYQPYRVVVLSFELLHAPATVCGPKKSTPLVKNKCVNFNFNGLTGTGVLTESNKKFLP
FQQFGRDIADITDAVRDPQTLEILDITPCSFGGVSVITPGTNTSNQVAVLYQDVNCTEVPVAIHADQLTPTWRVYSTGS
NVFQTRAGCLIGAEHVNNSYECDIPIGAGICASYQTQTNSPSRAGSVASQSIIAYTMSLGAENSVAYSNNSIAIPTNFTISV
TTEILPVSMTKTSVDCTMYICGDSTECSNLLLQYGSFCTQLNRALTGIAVEQDKNTQEVFAQVKQIYKTPPIKDFGGFNFS
QILPDPSKPSKRSFIEDLLFNKVTLADAGFIKQYGDCLGDIAARDLICAQKFNGLTVLPPLLTDEMIAQYTSALLAGTITSG
WTFGAGPALQIPFAMQMAYRFNGIGVTQNVLYENQKLIANQFNSAIGKIQDSLSSTPSALGKLQDVVNQNAQALNTL
VKQLSSNFGAISSVLNDILSRLDPPEAEVQIDRLITGRLQSLQTYVTQQLIRAAEIRASANLAATKMSECVLGQSKRVDFC
GKGYHLMSFPQSAPHGVVFLHVTYVPAQEKNFTTAPAICHDGKAHFPREGVFVSNGTHWFVTQRNFYEPQIITTDNTF
VSGNCDVVIGIVNNTVYDPLQPELDSFKEELDKYFKNHTSPDVDLGDISGINASVVNIQKEIDRLNEVAKNLNESLIDLQE
LGKYEQGSGYIPEAPRDGQAYVRKDGEWVLLSTFLGRSLEVLFQGPGSLPETGGGSDYKDDDDKGGGGSGGGGSGGG
GSGGGGSGGGGSHHHHHH
SEQ ID NO 162: SEQ ID NO 3 + A942P + A892P + T572I + G880C + F888C
MFVFLVLLPLVSSQCVNLTTRTQLPPAYTNSFTRGVYYPDKVFRSSVLHSTQDLFLPFFSNVTWFHAIHVSGTNGTKRFD
NPVLPFNDGVYFASTEKSNIIRGWIFGTTLDSKTQSLLIVNNATNVVIKVCEFQFCNDPFLGVYYHKNNKSWMESEFRVY
SSANNCTFEYVSQPFLMDLEGKQGNFKNLREFVFKNIDGYFKIYSKHTPINLVRDLPQGFSALEPLVDLPIGINITRFQTLL
ALHRSYLTPGDSSSGWTAGAAAYYVGYLQPRTFLLKYNENGTITDAVDCALDPLSETKCTLKSFTVEKGIYQTSNFRVQP
TESIVRFPNITNLCPFGEVFNATRFASVYAWNRKRISNCVADYSVLYNSASFSTFKCYGVSPTKLNDLCFTNVYADSFVIR
GDEVRQIAPGQTGKIADYNYKLPDDFTGCVIAWNSNNLDSKVGGNYNYLYRLFRKSNLKPFERDISTEIYQAGSTPCNG
VEGFNCYFPLQSYGFQPTNGVGYQPYRVVVLSFELLHAPATVCGPKKSTNLVKNKCVNFNFNGLTGTGVLTESNKKFLP
FQQFGRDIADITDAVRDPQTLEILDITPCSFGGVSVITPGTNTSNQVAVLYQDVNCTEVPVAIHADQLTPTWRVYSTGS
NVFQTRAGCLIGAEHVNNSYECDIPIGAGICASYQTQTNSPSRAGSVASQSIIAYTMSLGAENSVAYSNNSIAIPTNFTISV
TTEILPVSMTKTSVDCTMYICGDSTECSNLLLQYGSFCTQLNRALTGIAVEQDKNTQEVFAQVKQIYKTPPIKDFGGFNFS
QILPDPSKPSKRSFIEDLLFNKVTLADAGFIKQYGDCLGDIAARDLICAQKFNGLTVLPPLLTDEMIAQYTSALLACTITSG
WTCGAGPALQIPFAMQMAYRFNGIGVTQNVLYENQKLIANQFNSAIGKIQDSLSSTPSALGKLQDVVNQNAQALNTL
VKQLSSNFGAISSVLNDILSRLDPPEAEVQIDRLITGRLQSLQTYVTQQLIRAAEIRASANLAATKMSECVLGQSKRVDFC
GKGYHLMSFPQSAPHGVVFLHVTYVPAQEKNFTTAPAICHDGKAHFPREGVFVSNGTHWFVTQRNFYEPQIITTDNTF
VSGNCDVVIGIVNNTVYDPLQPELDSFKEELDKYFKNHTSPDVDLGDISGINASVVNIQKEIDRLNEVAKNLNESLIDLQE
LGKYEQGSGYIPEAPRDGQAYVRKDGEWVLLSTFLGRSLEVLFQGPGSLPETGGGSDYKDDDDKGGGGSGGGGSGGG
GSGGGGSGGGGSHHHHHH
SEQ ID NO 163: SEQ ID NO 3 + A942P + A892P + T572I + S884C + A893C
MFVFLVLLPLVSSQCVNLTTRTQLPPAYTNSFTRGVYYPDKVFRSSVLHSTQDLFLPFFSNVTWFHAIHVSGTNGTKRFD
NPVLPFNDGVYFASTEKSNIIRGWIFGTTLDSKTQSLLIVNNATNVVIKVCEFQFCNDPFLGVYYHKNNKSWMESEFRVY
SSANNCTFEYVSQPFLMDLEGKQGNFKNLREFVFKNIDGYFKIYSKHTPINLVRDLPQGFSALEPLVDLPIGINITRFQTLL
ALHRSYLTPGDSSSGWTAGAAAYYVGYLQPRTFLLKYNENGTITDAVDCALDPLSETKCTLKSFTVEKGIYQTSNFRVQP
TESIVRFPNITNLCPFGEVFNATRFASVYAWNRKRISNCVADYSVLYNSASFSTFKCYGVSPTKLNDLCFTNVYADSFVIR
GDEVRQIAPGQTGKIADYNYKLPDDFTGCVIAWNSNNLDSKVGGNYNYLYRLFRKSNLKPFERDISTEIYQAGSTPCNG
VEGFNCYFPLQSYGFQPTNGVGYQPYRVVVLSFELLHAPATVCGPKKSTNLVKNKCVNFNFNGLTGTGVLTESNKKFLP
FQQFGRDIADITDAVRDPQTLEILDITPCSFGGVSVITPGTNTSNQVAVLYQDVNCTEVPVAIHADQLTPTWRVYSTGS
NVFQTRAGCLIGAEHVNNSYECDIPIGAGICASYQTQTNSPSRAGSVASQSIIAYTMSLGAENSVAYSNNSIAIPTNFTISV
TTEILPVSMTKTSVDCTMYICGDSTECSNLLLQYGSFCTQLNRALTGIAVEQDKNTQEVFAQVKQIYKTPPIKDFGGFNFS
QILPDPSKPSKRSFIEDLLFNKVTLADAGFIKQYGDCLGDIAARDLICAQKFNGLTVLPPLLTDEMIAQYTSALLAGTITCG
WTFGAGPCLQIPFAMQMAYRFNGIGVTQNVLYENQKLIANQFNSAIGKIQDSLSSTPSALGKLQDVVNQNAQALNTL
VKQLSSNFGAISSVLNDILSRLDPPEAEVQIDRLITGRLQSLQTYVTQQLIRAAEIRASANLAATKMSECVLGQSKRVDFC
GKGYHLMSFPQSAPHGVVFLHVTYVPAQEKNFTTAPAICHDGKAHFPREGVFVSNGTHWFVTQRNFYEPQIITTDNTF
VSGNCDVVIGIVNNTVYDPLQPELDSFKEELDKYFKNHTSPDVDLGDISGINASVVNIQKEIDRLNEVAKNLNESLIDLQE
LGKYEQGSGYIPEAPRDGQAYVRKDGEWVLLSTFLGRSLEVLFQGPGSLPETGGGSDYKDDDDKGGGGSGGGGSGGG
GSGGGGSGGGGSHHHHHH
SEQ ID NO 164: SEQ ID NO 3 + A942P + A892P + N532P + G880C + F888C
MFVFLVLLPLVSSQCVNLTTRTQLPPAYTNSFTRGVYYPDKVFRSSVLHSTQDLFLPFFSNVTWFHAIHVSGTNGTKRFD
NPVLPFNDGVYFASTEKSNIIRGWIFGTTLDSKTQSLLIVNNATNVVIKVCEFQFCNDPFLGVYYHKNNKSWMESEFRVY
SSANNCTFEYVSQPFLMDLEGKQGNFKNLREFVFKNIDGYFKIYSKHTPINLVRDLPQGFSALEPLVDLPIGINITRFQTLL
ALHRSYLTPGDSSSGWTAGAAAYYVGYLQPRTFLLKYNENGTITDAVDCALDPLSETKCTLKSFTVEKGIYQTSNFRVQP
TESIVRFPNITNLCPFGEVFNATRFASVYAWNRKRISNCVADYSVLYNSASFSTFKCYGVSPTKLNDLCFTNVYADSFVIR
GDEVRQIAPGQTGKIADYNYKLPDDFTGCVIAWNSNNLDSKVGGNYNYLYRLFRKSNLKPFERDISTEIYQAGSTPCNG
VEGFNCYFPLQSYGFQPTNGVGYQPYRVVVLSFELLHAPATVCGPKKSTPLVKNKCVNFNFNGLTGTGVLTESNKKFLP
FQQFGRDIADTTDAVRDPQTLEILDITPCSFGGVSVITPGTNTSNQVAVLYQDVNCTEVPVAIHADQLTPTWRVYSTGS
NVFQTRAGCLIGAEHVNNSYECDIPIGAGICASYQTQTNSPSRAGSVASQSIIAYTMSLGAENSVAYSNNSIAIPTNFTISV
TTEILPVSMTKTSVDCTMYICGDSTECSNLLLQYGSFCTQLNRALTGIAVEQDKNTQEVFAQVKQIYKTPPIKDFGGFNFS
QILPDPSKPSKRSFIEDLLFNKVTLADAGFIKQYGDCLGDIAARDLICAQKFNGLTVLPPLLTDEMIAQYTSALLACTITSG
WTCGAGPALQIPFAMQMAYRFNGIGVTQNVLYENQKLIANQFNSAIGKIQDSLSSTPSALGKLQDVVNQNAQALNTL
VKQLSSNFGAISSVLNDILSRLDPPEAEVQIDRLITGRLQSLQTYVTQQLIRAAEIRASANLAATKMSECVLGQSKRVDFC
GKGYHLMSFPQSAPHGVVFLHVTYVPAQEKNFTTAPAICHDGKAHFPREGVFVSNGTHWFVTQRNFYEPQIITTDNTF
VSGNCDVVIGIVNNTVYDPLQPELDSFKEELDKYFKNHTSPDVDLGDISGINASVVNIQKEIDRLNEVAKNLNESLIDLQE
LGKYEQGSGYIPEAPRDGQAYVRKDGEWVLLSTFLGRSLEVLFQGPGSLPETGGGSDYKDDDDKGGGGSGGGGSGGG
GSGGGGSGGGGSHHHHHH
SEQ ID NO 165: SEQ ID NO 3 + A942P + A892P + N532P + S884C + A893C
MFVFLVLLPLVSSQCVNLTTRTQLPPAYTNSFTRGVYYPDKVFRSSVLHSTQDLFLPFFSNVTWFHAIHVSGTNGTKRFD
NPVLPFNDGVYFASTEKSNIIRGWIFGTTLDSKTQSLLIVNNATNVVIKVCEFQFCNDPFLGVYYHKNNKSWMESEFRVY
SSANNCTFEYVSQPFLMDLEGKQGNFKNLREFVFKNIDGYFKIYSKHTPINLVRDLPQGFSALEPLVDLPIGINITRFQTLL
ALHRSYLTPGDSSSGWTAGAAAYYVGYLQPRTFLLKYNENGTITDAVDCALDPLSETKCTLKSFTVEKGIYQTSNFRVQP
TESIVRFPNITNLCPFGEVFNATRFASVYAWNRKRISNCVADYSVLYNSASFSTFKCYGVSPTKLNDLCFTNVYADSFVIR
GDEVRQIAPGQTGKIADYNYKLPDDFTGCVIAWNSNNLDSKVGGNYNYLYRLFRKSNLKPFERDISTEIYQAGSTPCNG
VEGFNCYFPLQSYGFQPTNGVGYQPYRVVVLSFELLHAPATVCGPKKSTPLVKNKCVNFNFNGLTGTGVLTESNKKFLP
FQQFGRDIADTTDAVRDPQTLEILDITPCSFGGVSVITPGTNTSNQVAVLYQDVNCTEVPVAIHADQLTPTWRVYSTGS
NVFQTRAGCLIGAEHVNNSYECDIPIGAGICASYQTQTNSPSRAGSVASQSIIAYTMSLGAENSVAYSNNSIAIPTNFTISV
TTEILPVSMTKTSVDCTMYICGDSTECSNLLLQYGSFCTQLNRALTGIAVEQDKNTQEVFAQVKQIYKTPPIKDFGGFNFS
QILPDPSKPSKRSFIEDLLFNKVTLADAGFIKQYGDCLGDIAARDLICAQKFNGLTVLPPLLTDEMIAQYTSALLAGTITCG
WTFGAGPCLQIPFAMQMAYRFNGIGVTQNVLYENQKLIANQFNSAIGKIQDSLSSTPSALGKLQDVVNQNAQALNTL
VKQLSSNFGAISSVLNDILSRLDPPEAEVQIDRLITGRLQSLQTYVTQQLIRAAEIRASANLAATKMSECVLGQSKRVDFC
GKGYHLMSFPQSAPHGVVFLHVTYVPAQEKNFTTAPAICHDGKAHFPREGVFVSNGTHWFVTQRNFYEPQIITTDNTF
VSGNCDVVIGIVNNTVYDPLQPELDSFKEELDKYFKNHTSPDVDLGDISGINASVVNIQKEIDRLNEVAKNLNESLIDLQE
LGKYEQGSGYIPEAPRDGQAYVRKDGEWVLLSTFLGRSLEVLFQGPGSLPETGGGSDYKDDDDKGGGGSGGGGSGGG
GSGGGGSGGGGSHHHHHH
SEQ ID NO 166: SEQ ID NO 3 + A942P + D614N + T572I + N532P
MFVFLVLLPLVSSQCVNLTTRTQLPPAYTNSFTRGVYYPDKVFRSSVLHSTQDLFLPFFSNVTWFHAIHVSGTNGTKRFD
NPVLPFNDGVYFASTEKSNIIRGWIFGTTLDSKTQSLLIVNNATNVVIKVCEFQFCNDPFLGVYYHKNNKSWMESEFRVY
SSANNCTFEYVSQPFLMDLEGKQGNFKNLREFVFKNIDGYFKIYSKHTPINLVRDLPQGFSALEPLVDLPIGINITRFQTLL
ALHRSYLTPGDSSSGWTAGAAAYYVGYLQPRTFLLKYNENGTITDAVDCALDPLSETKCTLKSFTVEKGIYQTSNFRVQP
TESIVRFPNITNLCPFGEVFNATRFASVYAWNRKRISNCVADYSVLYNSASFSTFKCYGVSPTKLNDLCFTNVYADSFVIR
GDEVRQIAPGQTGKIADYNYKLPDDFTGCVIAWNSNNLDSKVGGNYNYLYRLFRKSNLKPFERDISTEIYQAGSTPCNG
VEGFNCYFPLQSYGFQPTNGVGYQPYRVVVLSFELLHAPATVCGPKKSTPLVKNKCVNFNFNGLTGTGVLTESNKKFLP
FQQFGRDIADITDAVRDPQTLEILDITPCSFGGVSVITPGTNTSNQVAVLYQNVNCTEVPVAIHADQLTPTWRVYSTGS
NVFQTRAGCLIGAEHVNNSYECDIPIGAGICASYQTQTNSPSRAGSVASQSIIAYTMSLGAENSVAYSNNSIAIPTNFTISV
TTEILPVSMTKTSVDCTMYICGDSTECSNLLLQYGSFCTQLNRALTGIAVEQDKNTQEVFAQVKQIYKTPPIKDFGGFNFS
QILPDPSKPSKRSFIEDLLFNKVTLADAGFIKQYGDCLGDIAARDLICAQKFNGLTVLPPLLTDEMIAQYTSALLAGTITSG
WTFGAGAALQIPFAMQMAYRFNGIGVTQNVLYENQKLIANQFNSAIGKIQDSLSSTPSALGKLQDVVNQNAQALNTL
VKQLSSNFGAISSVLNDILSRLDPPEAEVQIDRLITGRLQSLQTYVTQQLIRAAEIRASANLAATKMSECVLGQSKRVDFC
GKGYHLMSFPQSAPHGVVFLHVTYVPAQEKNFTTAPAICHDGKAHFPREGVFVSNGTHWFVTQRNFYEPQIITTDNTF
VSGNCDVVIGIVNNTVYDPLQPELDSFKEELDKYFKNHTSPDVDLGDISGINASVVNIQKEIDRLNEVAKNLNESLIDLQE
LGKYEQGSGYIPEAPRDGQAYVRKDGEWVLLSTFLGRSLEVLFQGPGSLPETGGGSDYKDDDDKGGGGSGGGGSGGG
GSGGGGSGGGGSHHHHHH
SEQ ID NO 167: SEQ ID NO 3 + A942P + D614N + T572I + G880C + F888C
MFVFLVLLPLVSSQCVNLTTRTQLPPAYTNSFTRGVYYPDKVFRSSVLHSTQDLFLPFFSNVTWFHAIHVSGTNGTKRFD
NPVLPFNDGVYFASTEKSNIIRGWIFGTTLDSKTQSLLIVNNATNVVIKVCEFQFCNDPFLGVYYHKNNKSWMESEFRVY
SSANNCTFEYVSQPFLMDLEGKQGNFKNLREFVFKNIDGYFKIYSKHTPINLVRDLPQGFSALEPLVDLPIGINITRFQTLL
ALHRSYLTPGDSSSGWTAGAAAYYVGYLQPRTFLLKYNENGTITDAVDCALDPLSETKCTLKSFTVEKGIYQTSNFRVQP
TESIVRFPNITNLCPFGEVFNATRFASVYAWNRKRISNCVADYSVLYNSASFSTFKCYGVSPTKLNDLCFTNVYADSFVIR
GDEVRQIAPGQTGKIADYNYKLPDDFTGCVIAWNSNNLDSKVGGNYNYLYRLFRKSNLKPFERDISTEIYQAGSTPCNG
VEGFNCYFPLQSYGFQPTNGVGYQPYRVVVLSFELLHAPATVCGPKKSTNLVKNKCVNFNFNGLTGTGVLTESNKKFLP
FQQFGRDIADITDAVRDPQTLEILDITPCSFGGVSVITPGTNTSNQVAVLYQNVNCTEVPVAIHADQLTPTWRVYSTGS
NVFQTRAGCLIGAEHVNNSYECDIPIGAGICASYQTQTNSPSRAGSVASQSIIAYTMSLGAENSVAYSNNSIAIPTNFTISV
TTEILPVSMTKTSVDCTMYICGDSTECSNLLLQYGSFCTQLNRALTGIAVEQDKNTQEVFAQVKQIYKTPPIKDFGGFNFS
QILPDPSKPSKRSFIEDLLFNKVTLADAGFIKQYGDCLGDIAARDLICAQKFNGLTVLPPLLTDEMIAQYTSALLACTITSG
WTCGAGAALQIPFAMQMAYRFNGIGVTQNVLYENQKLIANQFNSAIGKIQDSLSSTPSALGKLQDVVNQNAQALNTL
VKQLSSNFGAISSVLNDILSRLDPPEAEVQIDRLITGRLQSLQTYVTQQLIRAAEIRASANLAATKMSECVLGQSKRVDFC
GKGYHLMSFPQSAPHGVVFLHVTYVPAQEKNFTTAPAICHDGKAHFPREGVFVSNGTHWFVTQRNFYEPQIITTDNTF
VSGNCDVVIGIVNNTVYDPLQPELDSFKEELDKYFKNHTSPDVDLGDISGINASVVNIQKEIDRLNEVAKNLNESLIDLQE
LGKYEQGSGYIPEAPRDGQAYVRKDGEWVLLSTFLGRSLEVLFQGPGSLPETGGGSDYKDDDDKGGGGSGGGGSGGG
GSGGGGSGGGGSHHHHHH
SEQ ID NO 168: SEQ ID NO 3 + A942P + D614N + T572I + S884C + A893C
MFVFLVLLPLVSSQCVNLTTRTQLPPAYTNSFTRGVYYPDKVFRSSVLHSTQDLFLPFFSNVTWFHAIHVSGTNGTKRFD
NPVLPFNDGVYFASTEKSNIIRGWIFGTTLDSKTQSLLIVNNATNVVIKVCEFQFCNDPFLGVYYHKNNKSWMESEFRVY
SSANNCTFEYVSQPFLMDLEGKQGNFKNLREFVFKNIDGYFKIYSKHTPINLVRDLPQGFSALEPLVDLPIGINITRFQTLL
ALHRSYLTPGDSSSGWTAGAAAYYVGYLQPRTFLLKYNENGTITDAVDCALDPLSETKCTLKSFTVEKGIYQTSNFRVQP
TESIVRFPNITNLCPFGEVFNATRFASVYAWNRKRISNCVADYSVLYNSASFSTFKCYGVSPTKLNDLCFTNVYADSFVIR
GDEVRQIAPGQTGKIADYNYKLPDDFTGCVIAWNSNNLDSKVGGNYNYLYRLFRKSNLKPFERDISTEIYQAGSTPCNG
VEGFNCYFPLQSYGFQPTNGVGYQPYRVVVLSFELLHAPATVCGPKKSTNLVKNKCVNFNFNGLTGTGVLTESNKKFLP
FQQFGRDIADITDAVRDPQTLEILDITPCSFGGVSVITPGTNTSNQVAVLYQNVNCTEVPVAIHADQLTPTWRVYSTGS
NVFQTRAGCLIGAEHVNNSYECDIPIGAGICASYQTQTNSPSRAGSVASQSIIAYTMSLGAENSVAYSNNSIAIPTNFTISV
TTEILPVSMTKTSVDCTMYICGDSTECSNLLLQYGSFCTQLNRALTGIAVEQDKNTQEVFAQVKQIYKTPPIKDFGGFNFS
QILPDPSKPSKRSFIEDLLFNKVTLADAGFIKQYGDCLGDIAARDLICAQKFNGLTVLPPLLTDEMIAQYTSALLAGTITCG
WTFGAGACLQIPFAMQMAYRFNGIGVTQNVLYENQKLIANQFNSAIGKIQDSLSSTPSALGKLQDVVNQNAQALNTL
VKQLSSNFGAISSVLNDILSRLDPPEAEVQIDRLITGRLQSLQTYVTQQLIRAAEIRASANLAATKMSECVLGQSKRVDFC
GKGYHLMSFPQSAPHGVVFLHVTYVPAQEKNFTTAPAICHDGKAHFPREGVFVSNGTHWFVTQRNFYEPQIITTDNTF
VSGNCDVVIGIVNNTVYDPLQPELDSFKEELDKYFKNHTSPDVDLGDISGINASVVNIQKEIDRLNEVAKNLNESLIDLQE
LGKYEQGSGYIPEAPRDGQAYVRKDGEWVLLSTFLGRSLEVLFQGPGSLPETGGGSDYKDDDDKGGGGSGGGGSGGG
GSGGGGSGGGGSHHHHHH
SEQ ID NO 169: SEQ ID NO 3 + A942P + D614N + N532P + G880C + F888C
MFVFLVLLPLVSSQCVNLTTRTQLPPAYTNSFTRGVYYPDKVFRSSVLHSTQDLFLPFFSNVTWFHAIHVSGTNGTKRFD
NPVLPFNDGVYFASTEKSNIIRGWIFGTTLDSKTQSLLIVNNATNVVIKVCEFQFCNDPFLGVYYHKNNKSWMESEFRVY
SSANNCTFEYVSQPFLMDLEGKQGNFKNLREFVFKNIDGYFKIYSKHTPINLVRDLPQGFSALEPLVDLPIGINITRFQTLL
ALHRSYLTPGDSSSGWTAGAAAYYVGYLQPRTFLLKYNENGTITDAVDCALDPLSETKCTLKSFTVEKGIYQTSNFRVQP
TESIVRFPNITNLCPFGEVFNATRFASVYAWNRKRISNCVADYSVLYNSASFSTFKCYGVSPTKLNDLCFTNVYADSFVIR
GDEVRQIAPGQTGKIADYNYKLPDDFTGCVIAWNSNNLDSKVGGNYNYLYRLFRKSNLKPFERDISTEIYQAGSTPCNG
VEGFNCYFPLQSYGFQPTNGVGYQPYRVVVLSFELLHAPATVCGPKKSTPLVKNKCVNFNFNGLTGTGVLTESNKKFLP
FQQFGRDIADTTDAVRDPQTLEILDITPCSFGGVSVITPGTNTSNQVAVLYQNVNCTEVPVAIHADQLTPTWRVYSTGS
NVFQTRAGCLIGAEHVNNSYECDIPIGAGICASYQTQTNSPSRAGSVASQSIIAYTMSLGAENSVAYSNNSIAIPTNFTISV
TTEILPVSMTKTSVDCTMYICGDSTECSNLLLQYGSFCTQLNRALTGIAVEQDKNTQEVFAQVKQIYKTPPIKDFGGFNFS
QILPDPSKPSKRSFIEDLLFNKVTLADAGFIKQYGDCLGDIAARDLICAQKFNGLTVLPPLLTDEMIAQYTSALLACTITSG
WTCGAGAALQIPFAMQMAYRFNGIGVTQNVLYENQKLIANQFNSAIGKIQDSLSSTPSALGKLQDVVNQNAQALNTL
VKQLSSNFGAISSVLNDILSRLDPPEAEVQIDRLITGRLQSLQTYVTQQLIRAAEIRASANLAATKMSECVLGQSKRVDFC
GKGYHLMSFPQSAPHGVVFLHVTYVPAQEKNFTTAPAICHDGKAHFPREGVFVSNGTHWFVTQRNFYEPQIITTDNTF
VSGNCDVVIGIVNNTVYDPLQPELDSFKEELDKYFKNHTSPDVDLGDISGINASVVNIQKEIDRLNEVAKNLNESLIDLQE
LGKYEQGSGYIPEAPRDGQAYVRKDGEWVLLSTFLGRSLEVLFQGPGSLPETGGGSDYKDDDDKGGGGSGGGGSGGG
GSGGGGSGGGGSHHHHHH
SEQ ID NO 170: SEQ ID NO 3 + A942P + D614N + N532P + S884C + A893C
MFVFLVLLPLVSSQCVNLTTRTQLPPAYTNSFTRGVYYPDKVFRSSVLHSTQDLFLPFFSNVTWFHAIHVSGTNGTKRFD
NPVLPFNDGVYFASTEKSNIIRGWIFGTTLDSKTQSLLIVNNATNVVIKVCEFQFCNDPFLGVYYHKNNKSWMESEFRVY
SSANNCTFEYVSQPFLMDLEGKQGNFKNLREFVFKNIDGYFKIYSKHTPINLVRDLPQGFSALEPLVDLPIGINITRFQTLL
ALHRSYLTPGDSSSGWTAGAAAYYVGYLQPRTFLLKYNENGTITDAVDCALDPLSETKCTLKSFTVEKGIYQTSNFRVQP
TESIVRFPNITNLCPFGEVFNATRFASVYAWNRKRISNCVADYSVLYNSASFSTFKCYGVSPTKLNDLCFTNVYADSFVIR
GDEVRQIAPGQTGKIADYNYKLPDDFTGCVIAWNSNNLDSKVGGNYNYLYRLFRKSNLKPFERDISTEIYQAGSTPCNG
VEGFNCYFPLQSYGFQPTNGVGYQPYRVVVLSFELLHAPATVCGPKKSTPLVKNKCVNFNFNGLTGTGVLTESNKKFLP
FQQFGRDIADTTDAVRDPQTLEILDITPCSFGGVSVITPGTNTSNQVAVLYQNVNCTEVPVAIHADQLTPTWRVYSTGS
NVFQTRAGCLIGAEHVNNSYECDIPIGAGICASYQTQTNSPSRAGSVASQSIIAYTMSLGAENSVAYSNNSIAIPTNFTISV
TTEILPVSMTKTSVDCTMYICGDSTECSNLLLQYGSFCTQLNRALTGIAVEQDKNTQEVFAQVKQIYKTPPIKDFGGFNFS
QILPDPSKPSKRSFIEDLLFNKVTLADAGFIKQYGDCLGDIAARDLICAQKFNGLTVLPPLLTDEMIAQYTSALLAGTITCG
WTFGAGACLQIPFAMQMAYRFNGIGVTQNVLYENQKLIANQFNSAIGKIQDSLSSTPSALGKLQDVVNQNAQALNTL
VKQLSSNFGAISSVLNDILSRLDPPEAEVQIDRLITGRLQSLQTYVTQQLIRAAEIRASANLAATKMSECVLGQSKRVDFC
GKGYHLMSFPQSAPHGVVFLHVTYVPAQEKNFTTAPAICHDGKAHFPREGVFVSNGTHWFVTQRNFYEPQIITTDNTF
VSGNCDVVIGIVNNTVYDPLQPELDSFKEELDKYFKNHTSPDVDLGDISGINASVVNIQKEIDRLNEVAKNLNESLIDLQE
LGKYEQGSGYIPEAPRDGQAYVRKDGEWVLLSTFLGRSLEVLFQGPGSLPETGGGSDYKDDDDKGGGGSGGGGSGGG
GSGGGGSGGGGSHHHHHH
SEQ ID NO 171: SEQ ID NO 3 + A942P + T572I + N532P + G880C + F888C
MFVFLVLLPLVSSQCVNLTTRTQLPPAYTNSFTRGVYYPDKVFRSSVLHSTQDLFLPFFSNVTWFHAIHVSGTNGTKRFD
NPVLPFNDGVYFASTEKSNIIRGWIFGTTLDSKTQSLLIVNNATNVVIKVCEFQFCNDPFLGVYYHKNNKSWMESEFRVY
SSANNCTFEYVSQPFLMDLEGKQGNFKNLREFVFKNIDGYFKIYSKHTPINLVRDLPQGFSALEPLVDLPIGINITRFQTLL
ALHRSYLTPGDSSSGWTAGAAAYYVGYLQPRTFLLKYNENGTITDAVDCALDPLSETKCTLKSFTVEKGIYQTSNFRVQP
TESIVRFPNITNLCPFGEVFNATRFASVYAWNRKRISNCVADYSVLYNSASFSTFKCYGVSPTKLNDLCFTNVYADSFVIR
GDEVRQIAPGQTGKIADYNYKLPDDFTGCVIAWNSNNLDSKVGGNYNYLYRLFRKSNLKPFERDISTEIYQAGSTPCNG
VEGFNCYFPLQSYGFQPTNGVGYQPYRVVVLSFELLHAPATVCGPKKSTPLVKNKCVNFNFNGLTGTGVLTESNKKFLP
FQQFGRDIADITDAVRDPQTLEILDITPCSFGGVSVITPGTNTSNQVAVLYQDVNCTEVPVAIHADQLTPTWRVYSTGS
NVFQTRAGCLIGAEHVNNSYECDIPIGAGICASYQTQTNSPSRAGSVASQSIIAYTMSLGAENSVAYSNNSIAIPTNFTISV
TTEILPVSMTKTSVDCTMYICGDSTECSNLLLQYGSFCTQLNRALTGIAVEQDKNTQEVFAQVKQIYKTPPIKDFGGFNFS
QILPDPSKPSKRSFIEDLLFNKVTLADAGFIKQYGDCLGDIAARDLICAQKFNGLTVLPPLLTDEMIAQYTSALLACTITSG
WTCGAGAALQIPFAMQMAYRFNGIGVTQNVLYENQKLIANQFNSAIGKIQDSLSSTPSALGKLQDVVNQNAQALNTL
VKQLSSNFGAISSVLNDILSRLDPPEAEVQIDRLITGRLQSLQTYVTQQLIRAAEIRASANLAATKMSECVLGQSKRVDFC
GKGYHLMSFPQSAPHGVVFLHVTYVPAQEKNFTTAPAICHDGKAHFPREGVFVSNGTHWFVTQRNFYEPQIITTDNTF
VSGNCDVVIGIVNNTVYDPLQPELDSFKEELDKYFKNHTSPDVDLGDISGINASVVNIQKEIDRLNEVAKNLNESLIDLQE
LGKYEQGSGYIPEAPRDGQAYVRKDGEWVLLSTFLGRSLEVLFQGPGSLPETGGGSDYKDDDDKGGGGSGGGGSGGG
GSGGGGSGGGGSHHHHHH
SEQ ID NO 172: SEQ ID NO 3 + A942P + T572I + N532P + S884C + A893C
MFVFLVLLPLVSSQCVNLTTRTQLPPAYTNSFTRGVYYPDKVFRSSVLHSTQDLFLPFFSNVTWFHAIHVSGTNGTKRFD
NPVLPFNDGVYFASTEKSNIIRGWIFGTTLDSKTQSLLIVNNATNVVIKVCEFQFCNDPFLGVYYHKNNKSWMESEFRVY
SSANNCTFEYVSQPFLMDLEGKQGNFKNLREFVFKNIDGYFKIYSKHTPINLVRDLPQGFSALEPLVDLPIGINITRFQTLL
ALHRSYLTPGDSSSGWTAGAAAYYVGYLQPRTFLLKYNENGTITDAVDCALDPLSETKCTLKSFTVEKGIYQTSNFRVQP
TESIVRFPNITNLCPFGEVFNATRFASVYAWNRKRISNCVADYSVLYNSASFSTFKCYGVSPTKLNDLCFTNVYADSFVIR
GDEVRQIAPGQTGKIADYNYKLPDDFTGCVIAWNSNNLDSKVGGNYNYLYRLFRKSNLKPFERDISTEIYQAGSTPCNG
VEGFNCYFPLQSYGFQPTNGVGYQPYRVVVLSFELLHAPATVCGPKKSTPLVKNKCVNFNFNGLTGTGVLTESNKKFLP
FQQFGRDIADITDAVRDPQTLEILDITPCSFGGVSVITPGTNTSNQVAVLYQDVNCTEVPVAIHADQLTPTWRVYSTGS
NVFQTRAGCLIGAEHVNNSYECDIPIGAGICASYQTQTNSPSRAGSVASQSIIAYTMSLGAENSVAYSNNSIAIPTNFTISV
TTEILPVSMTKTSVDCTMYICGDSTECSNLLLQYGSFCTQLNRALTGIAVEQDKNTQEVFAQVKQIYKTPPIKDFGGFNFS
QILPDPSKPSKRSFIEDLLFNKVTLADAGFIKQYGDCLGDIAARDLICAQKFNGLTVLPPLLTDEMIAQYTSALLAGTITCG
WTFGAGACLQIPFAMQMAYRFNGIGVTQNVLYENQKLIANQFNSAIGKIQDSLSSTPSALGKLQDVVNQNAQALNTL
VKQLSSNFGAISSVLNDILSRLDPPEAEVQIDRLITGRLQSLQTYVTQQLIRAAEIRASANLAATKMSECVLGQSKRVDFC
GKGYHLMSFPQSAPHGVVFLHVTYVPAQEKNFTTAPAICHDGKAHFPREGVFVSNGTHWFVTQRNFYEPQIITTDNTF
VSGNCDVVIGIVNNTVYDPLQPELDSFKEELDKYFKNHTSPDVDLGDISGINASVVNIQKEIDRLNEVAKNLNESLIDLQE
LGKYEQGSGYIPEAPRDGQAYVRKDGEWVLLSTFLGRSLEVLFQGPGSLPETGGGSDYKDDDDKGGGGSGGGGSGGG
GSGGGGSGGGGSHHHHHH
SEQ ID NO 173: SEQ ID NO 3 + A892P + D614N + T572I + N532P
MFVFLVLLPLVSSQCVNLTTRTQLPPAYTNSFTRGVYYPDKVFRSSVLHSTQDLFLPFFSNVTWFHAIHVSGTNGTKRFD
NPVLPFNDGVYFASTEKSNIIRGWIFGTTLDSKTQSLLIVNNATNVVIKVCEFQFCNDPFLGVYYHKNNKSWMESEFRVY
SSANNCTFEYVSQPFLMDLEGKQGNFKNLREFVFKNIDGYFKIYSKHTPINLVRDLPQGFSALEPLVDLPIGINITRFQTLL
ALHRSYLTPGDSSSGWTAGAAAYYVGYLQPRTFLLKYNENGTITDAVDCALDPLSETKCTLKSFTVEKGIYQTSNFRVQP
TESIVRFPNITNLCPFGEVFNATRFASVYAWNRKRISNCVADYSVLYNSASFSTFKCYGVSPTKLNDLCFTNVYADSFVIR
GDEVRQIAPGQTGKIADYNYKLPDDFTGCVIAWNSNNLDSKVGGNYNYLYRLFRKSNLKPFERDISTEIYQAGSTPCNG
VEGFNCYFPLQSYGFQPTNGVGYQPYRVVVLSFELLHAPATVCGPKKSTPLVKNKCVNFNFNGLTGTGVLTESNKKFLP
FQQFGRDIADITDAVRDPQTLEILDITPCSFGGVSVITPGTNTSNQVAVLYQNVNCTEVPVAIHADQLTPTWRVYSTGS
NVFQTRAGCLIGAEHVNNSYECDIPIGAGICASYQTQTNSPSRAGSVASQSIIAYTMSLGAENSVAYSNNSIAIPTNFTISV
TTEILPVSMTKTSVDCTMYICGDSTECSNLLLQYGSFCTQLNRALTGIAVEQDKNTQEVFAQVKQIYKTPPIKDFGGFNFS
QILPDPSKPSKRSFIEDLLFNKVTLADAGFIKQYGDCLGDIAARDLICAQKFNGLTVLPPLLTDEMIAQYTSALLAGTITSG
WTFGAGPALQIPFAMQMAYRFNGIGVTQNVLYENQKLIANQFNSAIGKIQDSLSSTASALGKLQDVVNQNAQALNTL
VKQLSSNFGAISSVLNDILSRLDPPEAEVQIDRLITGRLQSLQTYVTQQLIRAAEIRASANLAATKMSECVLGQSKRVDFC
GKGYHLMSFPQSAPHGVVFLHVTYVPAQEKNFTTAPAICHDGKAHFPREGVFVSNGTHWFVTQRNFYEPQIITTDNTF
VSGNCDVVIGIVNNTVYDPLQPELDSFKEELDKYFKNHTSPDVDLGDISGINASVVNIQKEIDRLNEVAKNLNESLIDLQE
LGKYEQGSGYIPEAPRDGQAYVRKDGEWVLLSTFLGRSLEVLFQGPGSLPETGGGSDYKDDDDKGGGGSGGGGSGGG
GSGGGGSGGGGSHHHHHH
SEQ ID NO 174: SEQ ID NO 3 + A892P + D614N + T572I + G880C + F888C
MFVFLVLLPLVSSQCVNLTTRTQLPPAYTNSFTRGVYYPDKVFRSSVLHSTQDLFLPFFSNVTWFHAIHVSGTNGTKRFD
NPVLPFNDGVYFASTEKSNIIRGWIFGTTLDSKTQSLLIVNNATNVVIKVCEFQFCNDPFLGVYYHKNNKSWMESEFRVY
SSANNCTFEYVSQPFLMDLEGKQGNFKNLREFVFKNIDGYFKIYSKHTPINLVRDLPQGFSALEPLVDLPIGINITRFQTLL
ALHRSYLTPGDSSSGWTAGAAAYYVGYLQPRTFLLKYNENGTITDAVDCALDPLSETKCTLKSFTVEKGIYQTSNFRVQP
TESIVRFPNITNLCPFGEVFNATRFASVYAWNRKRISNCVADYSVLYNSASFSTFKCYGVSPTKLNDLCFTNVYADSFVIR
GDEVRQIAPGQTGKIADYNYKLPDDFTGCVIAWNSNNLDSKVGGNYNYLYRLFRKSNLKPFERDISTEIYQAGSTPCNG
VEGFNCYFPLQSYGFQPTNGVGYQPYRVVVLSFELLHAPATVCGPKKSTNLVKNKCVNFNFNGLTGTGVLTESNKKFLP
FQQFGRDIADITDAVRDPQTLEILDITPCSFGGVSVITPGTNTSNQVAVLYQNVNCTEVPVAIHADQLTPTWRVYSTGS
NVFQTRAGCLIGAEHVNNSYECDIPIGAGICASYQTQTNSPSRAGSVASQSIIAYTMSLGAENSVAYSNNSIAIPTNFTISV
TTEILPVSMTKTSVDCTMYICGDSTECSNLLLQYGSFCTQLNRALTGIAVEQDKNTQEVFAQVKQIYKTPPIKDFGGFNFS
QILPDPSKPSKRSFIEDLLFNKVTLADAGFIKQYGDCLGDIAARDLICAQKFNGLTVLPPLLTDEMIAQYTSALLACTITSG
WTCGAGPALQIPFAMQMAYRFNGIGVTQNVLYENQKLIANQFNSAIGKIQDSLSSTASALGKLQDVVNQNAQALNTL
VKQLSSNFGAISSVLNDILSRLDPPEAEVQIDRLITGRLQSLQTYVTQQLIRAAEIRASANLAATKMSECVLGQSKRVDFC
GKGYHLMSFPQSAPHGVVFLHVTYVPAQEKNFTTAPAICHDGKAHFPREGVFVSNGTHWFVTQRNFYEPQIITTDNTF
VSGNCDVVIGIVNNTVYDPLQPELDSFKEELDKYFKNHTSPDVDLGDISGINASVVNIQKEIDRLNEVAKNLNESLIDLQE
LGKYEQGSGYIPEAPRDGQAYVRKDGEWVLLSTFLGRSLEVLFQGPGSLPETGGGSDYKDDDDKGGGGSGGGGSGGG
GSGGGGSGGGGSHHHHHH
SEQ ID NO 175: SEQ ID NO 3 + A892P + D614N + T572I + S884C + A893C
MFVFLVLLPLVSSQCVNLTTRTQLPPAYTNSFTRGVYYPDKVFRSSVLHSTQDLFLPFFSNVTWFHAIHVSGTNGTKRFD
NPVLPFNDGVYFASTEKSNIIRGWIFGTTLDSKTQSLLIVNNATNVVIKVCEFQFCNDPFLGVYYHKNNKSWMESEFRVY
SSANNCTFEYVSQPFLMDLEGKQGNFKNLREFVFKNIDGYFKIYSKHTPINLVRDLPQGFSALEPLVDLPIGINITRFQTLL
ALHRSYLTPGDSSSGWTAGAAAYYVGYLQPRTFLLKYNENGTITDAVDCALDPLSETKCTLKSFTVEKGIYQTSNFRVQP
TESIVRFPNITNLCPFGEVFNATRFASVYAWNRKRISNCVADYSVLYNSASFSTFKCYGVSPTKLNDLCFTNVYADSFVIR
GDEVRQIAPGQTGKIADYNYKLPDDFTGCVIAWNSNNLDSKVGGNYNYLYRLFRKSNLKPFERDISTEIYQAGSTPCNG
VEGFNCYFPLQSYGFQPTNGVGYQPYRVVVLSFELLHAPATVCGPKKSTNLVKNKCVNFNFNGLTGTGVLTESNKKFLP
FQQFGRDIADITDAVRDPQTLEILDITPCSFGGVSVITPGTNTSNQVAVLYQNVNCTEVPVAIHADQLTPTWRVYSTGS
NVFQTRAGCLIGAEHVNNSYECDIPIGAGICASYQTQTNSPSRAGSVASQSIIAYTMSLGAENSVAYSNNSIAIPTNFTISV
TTEILPVSMTKTSVDCTMYICGDSTECSNLLLQYGSFCTQLNRALTGIAVEQDKNTQEVFAQVKQIYKTPPIKDFGGFNFS
QILPDPSKPSKRSFIEDLLFNKVTLADAGFIKQYGDCLGDIAARDLICAQKFNGLTVLPPLLTDEMIAQYTSALLAGTITCG
WTFGAGPCLQIPFAMQMAYRFNGIGVTQNVLYENQKLIANQFNSAIGKIQDSLSSTASALGKLQDVVNQNAQALNTL
VKQLSSNFGAISSVLNDILSRLDPPEAEVQIDRLITGRLQSLQTYVTQQLIRAAEIRASANLAATKMSECVLGQSKRVDFC
GKGYHLMSFPQSAPHGVVFLHVTYVPAQEKNFTTAPAICHDGKAHFPREGVFVSNGTHWFVTQRNFYEPQIITTDNTF
VSGNCDVVIGIVNNTVYDPLQPELDSFKEELDKYFKNHTSPDVDLGDISGINASVVNIQKEIDRLNEVAKNLNESLIDLQE
LGKYEQGSGYIPEAPRDGQAYVRKDGEWVLLSTFLGRSLEVLFQGPGSLPETGGGSDYKDDDDKGGGGSGGGGSGGG
GSGGGGSGGGGSHHHHHH
SEQ ID NO 176: SEQ ID NO 3 + A892P + D614N + N532P + G880C + F888C
MFVFLVLLPLVSSQCVNLTTRTQLPPAYTNSFTRGVYYPDKVFRSSVLHSTQDLFLPFFSNVTWFHAIHVSGTNGTKRFD
NPVLPFNDGVYFASTEKSNIIRGWIFGTTLDSKTQSLLIVNNATNVVIKVCEFQFCNDPFLGVYYHKNNKSWMESEFRVY
SSANNCTFEYVSQPFLMDLEGKQGNFKNLREFVFKNIDGYFKIYSKHTPINLVRDLPQGFSALEPLVDLPIGINITRFQTLL
ALHRSYLTPGDSSSGWTAGAAAYYVGYLQPRTFLLKYNENGTITDAVDCALDPLSETKCTLKSFTVEKGIYQTSNFRVQP
TESIVRFPNITNLCPFGEVFNATRFASVYAWNRKRISNCVADYSVLYNSASFSTFKCYGVSPTKLNDLCFTNVYADSFVIR
GDEVRQIAPGQTGKIADYNYKLPDDFTGCVIAWNSNNLDSKVGGNYNYLYRLFRKSNLKPFERDISTEIYQAGSTPCNG
VEGFNCYFPLQSYGFQPTNGVGYQPYRVVVLSFELLHAPATVCGPKKSTPLVKNKCVNFNFNGLTGTGVLTESNKKFLP
FQQFGRDIADTTDAVRDPQTLEILDITPCSFGGVSVITPGTNTSNQVAVLYQNVNCTEVPVAIHADQLTPTWRVYSTGS
NVFQTRAGCLIGAEHVNNSYECDIPIGAGICASYQTQTNSPSRAGSVASQSIIAYTMSLGAENSVAYSNNSIAIPTNFTISV
TTEILPVSMTKTSVDCTMYICGDSTECSNLLLQYGSFCTQLNRALTGIAVEQDKNTQEVFAQVKQIYKTPPIKDFGGFNFS
QILPDPSKPSKRSFIEDLLFNKVTLADAGFIKQYGDCLGDIAARDLICAQKFNGLTVLPPLLTDEMIAQYTSALLACTITSG
WTCGAGPALQIPFAMQMAYRFNGIGVTQNVLYENQKLIANQFNSAIGKIQDSLSSTASALGKLQDVVNQNAQALNTL
VKQLSSNFGAISSVLNDILSRLDPPEAEVQIDRLITGRLQSLQTYVTQQLIRAAEIRASANLAATKMSECVLGQSKRVDFC
GKGYHLMSFPQSAPHGVVFLHVTYVPAQEKNFTTAPAICHDGKAHFPREGVFVSNGTHWFVTQRNFYEPQIITTDNTF
VSGNCDVVIGIVNNTVYDPLQPELDSFKEELDKYFKNHTSPDVDLGDISGINASVVNIQKEIDRLNEVAKNLNESLIDLQE
LGKYEQGSGYIPEAPRDGQAYVRKDGEWVLLSTFLGRSLEVLFQGPGSLPETGGGSDYKDDDDKGGGGSGGGGSGGG
GSGGGGSGGGGSHHHHHH
SEQ ID NO 177: SEQ ID NO 3 + A892P + D614N + N532P + S884C + A893C
MFVFLVLLPLVSSQCVNLTTRTQLPPAYTNSFTRGVYYPDKVFRSSVLHSTQDLFLPFFSNVTWFHAIHVSGTNGTKRFD
NPVLPFNDGVYFASTEKSNIIRGWIFGTTLDSKTQSLLIVNNATNVVIKVCEFQFCNDPFLGVYYHKNNKSWMESEFRVY
SSANNCTFEYVSQPFLMDLEGKQGNFKNLREFVFKNIDGYFKIYSKHTPINLVRDLPQGFSALEPLVDLPIGINITRFQTLL
ALHRSYLTPGDSSSGWTAGAAAYYVGYLQPRTFLLKYNENGTITDAVDCALDPLSETKCTLKSFTVEKGIYQTSNFRVQP
TESIVRFPNITNLCPFGEVFNATRFASVYAWNRKRISNCVADYSVLYNSASFSTFKCYGVSPTKLNDLCFTNVYADSFVIR
GDEVRQIAPGQTGKIADYNYKLPDDFTGCVIAWNSNNLDSKVGGNYNYLYRLFRKSNLKPFERDISTEIYQAGSTPCNG
VEGFNCYFPLQSYGFQPTNGVGYQPYRVVVLSFELLHAPATVCGPKKSTPLVKNKCVNFNFNGLTGTGVLTESNKKFLP
FQQFGRDIADTTDAVRDPQTLEILDITPCSFGGVSVITPGTNTSNQVAVLYQNVNCTEVPVAIHADQLTPTWRVYSTGS
NVFQTRAGCLIGAEHVNNSYECDIPIGAGICASYQTQTNSPSRAGSVASQSIIAYTMSLGAENSVAYSNNSIAIPTNFTISV
TTEILPVSMTKTSVDCTMYICGDSTECSNLLLQYGSFCTQLNRALTGIAVEQDKNTQEVFAQVKQIYKTPPIKDFGGFNFS
QILPDPSKPSKRSFIEDLLFNKVTLADAGFIKQYGDCLGDIAARDLICAQKFNGLTVLPPLLTDEMIAQYTSALLAGTITCG
WTFGAGPCLQIPFAMQMAYRFNGIGVTQNVLYENQKLIANQFNSAIGKIQDSLSSTASALGKLQDVVNQNAQALNTL
VKQLSSNFGAISSVLNDILSRLDPPEAEVQIDRLITGRLQSLQTYVTQQLIRAAEIRASANLAATKMSECVLGQSKRVDFC
GKGYHLMSFPQSAPHGVVFLHVTYVPAQEKNFTTAPAICHDGKAHFPREGVFVSNGTHWFVTQRNFYEPQIITTDNTF
VSGNCDVVIGIVNNTVYDPLQPELDSFKEELDKYFKNHTSPDVDLGDISGINASVVNIQKEIDRLNEVAKNLNESLIDLQE
LGKYEQGSGYIPEAPRDGQAYVRKDGEWVLLSTFLGRSLEVLFQGPGSLPETGGGSDYKDDDDKGGGGSGGGGSGGG
GSGGGGSGGGGSHHHHHH
SEQ ID NO 178: SEQ ID NO 3 + A892P + T572I + N532P + G880C + F888C
MFVFLVLLPLVSSQCVNLTTRTQLPPAYTNSFTRGVYYPDKVFRSSVLHSTQDLFLPFFSNVTWFHAIHVSGTNGTKRFD
NPVLPFNDGVYFASTEKSNIIRGWIFGTTLDSKTQSLLIVNNATNVVIKVCEFQFCNDPFLGVYYHKNNKSWMESEFRVY
SSANNCTFEYVSQPFLMDLEGKQGNFKNLREFVFKNIDGYFKIYSKHTPINLVRDLPQGFSALEPLVDLPIGINITRFQTLL
ALHRSYLTPGDSSSGWTAGAAAYYVGYLQPRTFLLKYNENGTITDAVDCALDPLSETKCTLKSFTVEKGIYQTSNFRVQP
TESIVRFPNITNLCPFGEVFNATRFASVYAWNRKRISNCVADYSVLYNSASFSTFKCYGVSPTKLNDLCFTNVYADSFVIR
GDEVRQIAPGQTGKIADYNYKLPDDFTGCVIAWNSNNLDSKVGGNYNYLYRLFRKSNLKPFERDISTEIYQAGSTPCNG
VEGFNCYFPLQSYGFQPTNGVGYQPYRVVVLSFELLHAPATVCGPKKSTPLVKNKCVNFNFNGLTGTGVLTESNKKFLP
FQQFGRDIADITDAVRDPQTLEILDITPCSFGGVSVITPGTNTSNQVAVLYQDVNCTEVPVAIHADQLTPTWRVYSTGS
NVFQTRAGCLIGAEHVNNSYECDIPIGAGICASYQTQTNSPSRAGSVASQSIIAYTMSLGAENSVAYSNNSIAIPTNFTISV
TTEILPVSMTKTSVDCTMYICGDSTECSNLLLQYGSFCTQLNRALTGIAVEQDKNTQEVFAQVKQIYKTPPIKDFGGFNFS
QILPDPSKPSKRSFIEDLLFNKVTLADAGFIKQYGDCLGDIAARDLICAQKFNGLTVLPPLLTDEMIAQYTSALLACTITSG
WTCGAGPALQIPFAMQMAYRFNGIGVTQNVLYENQKLIANQFNSAIGKIQDSLSSTASALGKLQDVVNQNAQALNTL
VKQLSSNFGAISSVLNDILSRLDPPEAEVQIDRLITGRLQSLQTYVTQQLIRAAEIRASANLAATKMSECVLGQSKRVDFC
GKGYHLMSFPQSAPHGVVFLHVTYVPAQEKNFTTAPAICHDGKAHFPREGVFVSNGTHWFVTQRNFYEPQIITTDNTF
VSGNCDVVIGIVNNTVYDPLQPELDSFKEELDKYFKNHTSPDVDLGDISGINASVVNIQKEIDRLNEVAKNLNESLIDLQE
LGKYEQGSGYIPEAPRDGQAYVRKDGEWVLLSTFLGRSLEVLFQGPGSLPETGGGSDYKDDDDKGGGGSGGGGSGGG
GSGGGGSGGGGSHHHHHH
SEQ ID NO 179: SEQ ID NO 3 + A892P + T572I + N532P + S884C + A893C
MFVFLVLLPLVSSQCVNLTTRTQLPPAYTNSFTRGVYYPDKVFRSSVLHSTQDLFLPFFSNVTWFHAIHVSGTNGTKRFD
NPVLPFNDGVYFASTEKSNIIRGWIFGTTLDSKTQSLLIVNNATNVVIKVCEFQFCNDPFLGVYYHKNNKSWMESEFRVY
SSANNCTFEYVSQPFLMDLEGKQGNFKNLREFVFKNIDGYFKIYSKHTPINLVRDLPQGFSALEPLVDLPIGINITRFQTLL
ALHRSYLTPGDSSSGWTAGAAAYYVGYLQPRTFLLKYNENGTITDAVDCALDPLSETKCTLKSFTVEKGIYQTSNFRVQP
TESIVRFPNITNLCPFGEVFNATRFASVYAWNRKRISNCVADYSVLYNSASFSTFKCYGVSPTKLNDLCFTNVYADSFVIR
GDEVRQIAPGQTGKIADYNYKLPDDFTGCVIAWNSNNLDSKVGGNYNYLYRLFRKSNLKPFERDISTEIYQAGSTPCNG
VEGFNCYFPLQSYGFQPTNGVGYQPYRVVVLSFELLHAPATVCGPKKSTPLVKNKCVNFNFNGLTGTGVLTESNKKFLP
FQQFGRDIADITDAVRDPQTLEILDITPCSFGGVSVITPGTNTSNQVAVLYQDVNCTEVPVAIHADQLTPTWRVYSTGS
NVFQTRAGCLIGAEHVNNSYECDIPIGAGICASYQTQTNSPSRAGSVASQSIIAYTMSLGAENSVAYSNNSIAIPTNFTISV
TTEILPVSMTKTSVDCTMYICGDSTECSNLLLQYGSFCTQLNRALTGIAVEQDKNTQEVFAQVKQIYKTPPIKDFGGFNFS
QILPDPSKPSKRSFIEDLLFNKVTLADAGFIKQYGDCLGDIAARDLICAQKFNGLTVLPPLLTDEMIAQYTSALLAGTITCG
WTFGAGPCLQIPFAMQMAYRFNGIGVTQNVLYENQKLIANQFNSAIGKIQDSLSSTASALGKLQDVVNQNAQALNTL
VKQLSSNFGAISSVLNDILSRLDPPEAEVQIDRLITGRLQSLQTYVTQQLIRAAEIRASANLAATKMSECVLGQSKRVDFC
GKGYHLMSFPQSAPHGVVFLHVTYVPAQEKNFTTAPAICHDGKAHFPREGVFVSNGTHWFVTQRNFYEPQIITTDNTF
VSGNCDVVIGIVNNTVYDPLQPELDSFKEELDKYFKNHTSPDVDLGDISGINASVVNIQKEIDRLNEVAKNLNESLIDLQE
LGKYEQGSGYIPEAPRDGQAYVRKDGEWVLLSTFLGRSLEVLFQGPGSLPETGGGSDYKDDDDKGGGGSGGGGSGGG
GSGGGGSGGGGSHHHHHH
SEQ ID NO 180: SEQ ID NO 3 + D614N + T572I + N532P + G880C + F888C
MFVFLVLLPLVSSQCVNLTTRTQLPPAYTNSFTRGVYYPDKVFRSSVLHSTQDLFLPFFSNVTWFHAIHVSGTNGTKRFD
NPVLPFNDGVYFASTEKSNIIRGWIFGTTLDSKTQSLLIVNNATNVVIKVCEFQFCNDPFLGVYYHKNNKSWMESEFRVY
SSANNCTFEYVSQPFLMDLEGKQGNFKNLREFVFKNIDGYFKIYSKHTPINLVRDLPQGFSALEPLVDLPIGINITRFQTLL
ALHRSYLTPGDSSSGWTAGAAAYYVGYLQPRTFLLKYNENGTITDAVDCALDPLSETKCTLKSFTVEKGIYQTSNFRVQP
TESIVRFPNITNLCPFGEVFNATRFASVYAWNRKRISNCVADYSVLYNSASFSTFKCYGVSPTKLNDLCFTNVYADSFVIR
GDEVRQIAPGQTGKIADYNYKLPDDFTGCVIAWNSNNLDSKVGGNYNYLYRLFRKSNLKPFERDISTEIYQAGSTPCNG
VEGFNCYFPLQSYGFQPTNGVGYQPYRVVVLSFELLHAPATVCGPKKSTPLVKNKCVNFNFNGLTGTGVLTESNKKFLP
FQQFGRDIADITDAVRDPQTLEILDITPCSFGGVSVITPGTNTSNQVAVLYQNVNCTEVPVAIHADQLTPTWRVYSTGS
NVFQTRAGCLIGAEHVNNSYECDIPIGAGICASYQTQTNSPSRAGSVASQSIIAYTMSLGAENSVAYSNNSIAIPTNFTISV
TTEILPVSMTKTSVDCTMYICGDSTECSNLLLQYGSFCTQLNRALTGIAVEQDKNTQEVFAQVKQIYKTPPIKDFGGFNFS
QILPDPSKPSKRSFIEDLLFNKVTLADAGFIKQYGDCLGDIAARDLICAQKFNGLTVLPPLLTDEMIAQYTSALLACTITSG
WTCGAGAALQIPFAMQMAYRFNGIGVTQNVLYENQKLIANQFNSAIGKIQDSLSSTASALGKLQDVVNQNAQALNTL
VKQLSSNFGAISSVLNDILSRLDPPEAEVQIDRLITGRLQSLQTYVTQQLIRAAEIRASANLAATKMSECVLGQSKRVDFC
GKGYHLMSFPQSAPHGVVFLHVTYVPAQEKNFTTAPAICHDGKAHFPREGVFVSNGTHWFVTQRNFYEPQIITTDNTF
VSGNCDVVIGIVNNTVYDPLQPELDSFKEELDKYFKNHTSPDVDLGDISGINASVVNIQKEIDRLNEVAKNLNESLIDLQE
LGKYEQGSGYIPEAPRDGQAYVRKDGEWVLLSTFLGRSLEVLFQGPGSLPETGGGSDYKDDDDKGGGGSGGGGSGGG
GSGGGGSGGGGSHHHHHH
SEQ ID NO 181: SEQ ID NO 3 + D614N + T572I + N532P + S884C + A893C
MFVFLVLLPLVSSQCVNLTTRTQLPPAYTNSFTRGVYYPDKVFRSSVLHSTQDLFLPFFSNVTWFHAIHVSGTNGTKRFD
NPVLPFNDGVYFASTEKSNIIRGWIFGTTLDSKTQSLLIVNNATNVVIKVCEFQFCNDPFLGVYYHKNNKSWMESEFRVY
SSANNCTFEYVSQPFLMDLEGKQGNFKNLREFVFKNIDGYFKIYSKHTPINLVRDLPQGFSALEPLVDLPIGINITRFQTLL
ALHRSYLTPGDSSSGWTAGAAAYYVGYLQPRTFLLKYNENGTITDAVDCALDPLSETKCTLKSFTVEKGIYQTSNFRVQP
TESIVRFPNITNLCPFGEVFNATRFASVYAWNRKRISNCVADYSVLYNSASFSTFKCYGVSPTKLNDLCFTNVYADSFVIR
GDEVRQIAPGQTGKIADYNYKLPDDFTGCVIAWNSNNLDSKVGGNYNYLYRLFRKSNLKPFERDISTEIYQAGSTPCNG
VEGFNCYFPLQSYGFQPTNGVGYQPYRVVVLSFELLHAPATVCGPKKSTPLVKNKCVNFNFNGLTGTGVLTESNKKFLP
FQQFGRDIADITDAVRDPQTLEILDITPCSFGGVSVITPGTNTSNQVAVLYQNVNCTEVPVAIHADQLTPTWRVYSTGS
NVFQTRAGCLIGAEHVNNSYECDIPIGAGICASYQTQTNSPSRAGSVASQSIIAYTMSLGAENSVAYSNNSIAIPTNFTISV
TTEILPVSMTKTSVDCTMYICGDSTECSNLLLQYGSFCTQLNRALTGIAVEQDKNTQEVFAQVKQIYKTPPIKDFGGFNFS
QILPDPSKPSKRSFIEDLLFNKVTLADAGFIKQYGDCLGDIAARDLICAQKFNGLTVLPPLLTDEMIAQYTSALLAGTITCG
WTFGAGACLQIPFAMQMAYRFNGIGVTQNVLYENQKLIANQFNSAIGKIQDSLSSTASALGKLQDVVNQNAQALNTL
VKQLSSNFGAISSVLNDILSRLDPPEAEVQIDRLITGRLQSLQTYVTQQLIRAAEIRASANLAATKMSECVLGQSKRVDFC
GKGYHLMSFPQSAPHGVVFLHVTYVPAQEKNFTTAPAICHDGKAHFPREGVFVSNGTHWFVTQRNFYEPQIITTDNTF
VSGNCDVVIGIVNNTVYDPLQPELDSFKEELDKYFKNHTSPDVDLGDISGINASVVNIQKEIDRLNEVAKNLNESLIDLQE
LGKYEQGSGYIPEAPRDGQAYVRKDGEWVLLSTFLGRSLEVLFQGPGSLPETGGGSDYKDDDDKGGGGSGGGGSGGG
GSGGGGSGGGGSHHHHHH
SEQ ID NO 182: SEQ ID NO 3 + A942P + A892P + D614N + T572I + N532P
MFVFLVLLPLVSSQCVNLTTRTQLPPAYTNSFTRGVYYPDKVFRSSVLHSTQDLFLPFFSNVTWFHAIHVSGTNGTKRFD
NPVLPFNDGVYFASTEKSNIIRGWIFGTTLDSKTQSLLIVNNATNVVIKVCEFQFCNDPFLGVYYHKNNKSWMESEFRVY
SSANNCTFEYVSQPFLMDLEGKQGNFKNLREFVFKNIDGYFKIYSKHTPINLVRDLPQGFSALEPLVDLPIGINITRFQTLL
ALHRSYLTPGDSSSGWTAGAAAYYVGYLQPRTFLLKYNENGTITDAVDCALDPLSETKCTLKSFTVEKGIYQTSNFRVQP
TESIVRFPNITNLCPFGEVFNATRFASVYAWNRKRISNCVADYSVLYNSASFSTFKCYGVSPTKLNDLCFTNVYADSFVIR
GDEVRQIAPGQTGKIADYNYKLPDDFTGCVIAWNSNNLDSKVGGNYNYLYRLFRKSNLKPFERDISTEIYQAGSTPCNG
VEGFNCYFPLQSYGFQPTNGVGYQPYRVVVLSFELLHAPATVCGPKKSTPLVKNKCVNFNFNGLTGTGVLTESNKKFLP
FQQFGRDIADITDAVRDPQTLEILDITPCSFGGVSVITPGTNTSNQVAVLYQNVNCTEVPVAIHADQLTPTWRVYSTGS
NVFQTRAGCLIGAEHVNNSYECDIPIGAGICASYQTQTNSPSRAGSVASQSIIAYTMSLGAENSVAYSNNSIAIPTNFTISV
TTEILPVSMTKTSVDCTMYICGDSTECSNLLLQYGSFCTQLNRALTGIAVEQDKNTQEVFAQVKQIYKTPPIKDFGGFNFS
QILPDPSKPSKRSFIEDLLFNKVTLADAGFIKQYGDCLGDIAARDLICAQKFNGLTVLPPLLTDEMIAQYTSALLAGTITSG
WTFGAGPALQIPFAMQMAYRFNGIGVTQNVLYENQKLIANQFNSAIGKIQDSLSSTPSALGKLQDVVNQNAQALNTL
VKQLSSNFGAISSVLNDILSRLDPPEAEVQIDRLITGRLQSLQTYVTQQLIRAAEIRASANLAATKMSECVLGQSKRVDFC
GKGYHLMSFPQSAPHGVVFLHVTYVPAQEKNFTTAPAICHDGKAHFPREGVFVSNGTHWFVTQRNFYEPQIITTDNTF
VSGNCDVVIGIVNNTVYDPLQPELDSFKEELDKYFKNHTSPDVDLGDISGINASVVNIQKEIDRLNEVAKNLNESLIDLQE
LGKYEQGSGYIPEAPRDGQAYVRKDGEWVLLSTFLGRSLEVLFQGPGSLPETGGGSDYKDDDDKGGGGSGGGGSGGG
GSGGGGSGGGGSHHHHHH
SEQ ID NO 183: SEQ ID NO 3 + A942P + A892P + D614N + T572I + G880C + F888C
MFVFLVLLPLVSSQCVNLTTRTQLPPAYTNSFTRGVYYPDKVFRSSVLHSTQDLFLPFFSNVTWFHAIHVSGTNGTKRFD
NPVLPFNDGVYFASTEKSNIIRGWIFGTTLDSKTQSLLIVNNATNVVIKVCEFQFCNDPFLGVYYHKNNKSWMESEFRVY
SSANNCTFEYVSQPFLMDLEGKQGNFKNLREFVFKNIDGYFKIYSKHTPINLVRDLPQGFSALEPLVDLPIGINITRFQTLL
ALHRSYLTPGDSSSGWTAGAAAYYVGYLQPRTFLLKYNENGTITDAVDCALDPLSETKCTLKSFTVEKGIYQTSNFRVQP
TESIVRFPNITNLCPFGEVFNATRFASVYAWNRKRISNCVADYSVLYNSASFSTFKCYGVSPTKLNDLCFTNVYADSFVIR
GDEVRQIAPGQTGKIADYNYKLPDDFTGCVIAWNSNNLDSKVGGNYNYLYRLFRKSNLKPFERDISTEIYQAGSTPCNG
VEGFNCYFPLQSYGFQPTNGVGYQPYRVVVLSFELLHAPATVCGPKKSTNLVKNKCVNFNFNGLTGTGVLTESNKKFLP
FQQFGRDIADITDAVRDPQTLEILDITPCSFGGVSVITPGTNTSNQVAVLYQNVNCTEVPVAIHADQLTPTWRVYSTGS
NVFQTRAGCLIGAEHVNNSYECDIPIGAGICASYQTQTNSPSRAGSVASQSIIAYTMSLGAENSVAYSNNSIAIPTNFTISV
TTEILPVSMTKTSVDCTMYICGDSTECSNLLLQYGSFCTQLNRALTGIAVEQDKNTQEVFAQVKQIYKTPPIKDFGGFNFS
QILPDPSKPSKRSFIEDLLFNKVTLADAGFIKQYGDCLGDIAARDLICAQKFNGLTVLPPLLTDEMIAQYTSALLACTITSG
WTCGAGPALQIPFAMQMAYRFNGIGVTQNVLYENQKLIANQFNSAIGKIQDSLSSTPSALGKLQDVVNQNAQALNTL
VKQLSSNFGAISSVLNDILSRLDPPEAEVQIDRLITGRLQSLQTYVTQQLIRAAEIRASANLAATKMSECVLGQSKRVDFC
GKGYHLMSFPQSAPHGVVFLHVTYVPAQEKNFTTAPAICHDGKAHFPREGVFVSNGTHWFVTQRNFYEPQIITTDNTF
VSGNCDVVIGIVNNTVYDPLQPELDSFKEELDKYFKNHTSPDVDLGDISGINASVVNIQKEIDRLNEVAKNLNESLIDLQE
LGKYEQGSGYIPEAPRDGQAYVRKDGEWVLLSTFLGRSLEVLFQGPGSLPETGGGSDYKDDDDKGGGGSGGGGSGGG
GSGGGGSGGGGSHHHHHH
SEQ ID NO 184: SEQ ID NO 3 + A942P + A892P + D614N + T572I + S884C + A893C
MFVFLVLLPLVSSQCVNLTTRTQLPPAYTNSFTRGVYYPDKVFRSSVLHSTQDLFLPFFSNVTWFHAIHVSGTNGTKRFD
NPVLPFNDGVYFASTEKSNIIRGWIFGTTLDSKTQSLLIVNNATNVVIKVCEFQFCNDPFLGVYYHKNNKSWMESEFRVY
SSANNCTFEYVSQPFLMDLEGKQGNFKNLREFVFKNIDGYFKIYSKHTPINLVRDLPQGFSALEPLVDLPIGINITRFQTLL
ALHRSYLTPGDSSSGWTAGAAAYYVGYLQPRTFLLKYNENGTITDAVDCALDPLSETKCTLKSFTVEKGIYQTSNFRVQP
TESIVRFPNITNLCPFGEVFNATRFASVYAWNRKRISNCVADYSVLYNSASFSTFKCYGVSPTKLNDLCFTNVYADSFVIR
GDEVRQIAPGQTGKIADYNYKLPDDFTGCVIAWNSNNLDSKVGGNYNYLYRLFRKSNLKPFERDISTEIYQAGSTPCNG
VEGFNCYFPLQSYGFQPTNGVGYQPYRVVVLSFELLHAPATVCGPKKSTNLVKNKCVNFNFNGLTGTGVLTESNKKFLP
FQQFGRDIADITDAVRDPQTLEILDITPCSFGGVSVITPGTNTSNQVAVLYQNVNCTEVPVAIHADQLTPTWRVYSTGS
NVFQTRAGCLIGAEHVNNSYECDIPIGAGICASYQTQTNSPSRAGSVASQSIIAYTMSLGAENSVAYSNNSIAIPTNFTISV
TTEILPVSMTKTSVDCTMYICGDSTECSNLLLQYGSFCTQLNRALTGIAVEQDKNTQEVFAQVKQIYKTPPIKDFGGFNFS
QILPDPSKPSKRSFIEDLLFNKVTLADAGFIKQYGDCLGDIAARDLICAQKFNGLTVLPPLLTDEMIAQYTSALLAGTITCG
WTFGAGPCLQIPFAMQMAYRFNGIGVTQNVLYENQKLIANQFNSAIGKIQDSLSSTPSALGKLQDVVNQNAQALNTL
VKQLSSNFGAISSVLNDILSRLDPPEAEVQIDRLITGRLQSLQTYVTQQLIRAAEIRASANLAATKMSECVLGQSKRVDFC
GKGYHLMSFPQSAPHGVVFLHVTYVPAQEKNFTTAPAICHDGKAHFPREGVFVSNGTHWFVTQRNFYEPQIITTDNTF
VSGNCDVVIGIVNNTVYDPLQPELDSFKEELDKYFKNHTSPDVDLGDISGINASVVNIQKEIDRLNEVAKNLNESLIDLQE
LGKYEQGSGYIPEAPRDGQAYVRKDGEWVLLSTFLGRSLEVLFQGPGSLPETGGGSDYKDDDDKGGGGSGGGGSGGG
GSGGGGSGGGGSHHHHHH
SEQ ID NO 185: SEQ ID NO 3 + A942P + A892P + D614N + N532P + G880C + F888C
MFVFLVLLPLVSSQCVNLTTRTQLPPAYTNSFTRGVYYPDKVFRSSVLHSTQDLFLPFFSNVTWFHAIHVSGTNGTKRFD
NPVLPFNDGVYFASTEKSNIIRGWIFGTTLDSKTQSLLIVNNATNVVIKVCEFQFCNDPFLGVYYHKNNKSWMESEFRVY
SSANNCTFEYVSQPFLMDLEGKQGNFKNLREFVFKNIDGYFKIYSKHTPINLVRDLPQGFSALEPLVDLPIGINITRFQTLL
ALHRSYLTPGDSSSGWTAGAAAYYVGYLQPRTFLLKYNENGTITDAVDCALDPLSETKCTLKSFTVEKGIYQTSNFRVQP
TESIVRFPNITNLCPFGEVFNATRFASVYAWNRKRISNCVADYSVLYNSASFSTFKCYGVSPTKLNDLCFTNVYADSFVIR
GDEVRQIAPGQTGKIADYNYKLPDDFTGCVIAWNSNNLDSKVGGNYNYLYRLFRKSNLKPFERDISTEIYQAGSTPCNG
VEGFNCYFPLQSYGFQPTNGVGYQPYRVVVLSFELLHAPATVCGPKKSTPLVKNKCVNFNFNGLTGTGVLTESNKKFLP
FQQFGRDIADTTDAVRDPQTLEILDITPCSFGGVSVITPGTNTSNQVAVLYQNVNCTEVPVAIHADQLTPTWRVYSTGS
NVFQTRAGCLIGAEHVNNSYECDIPIGAGICASYQTQTNSPSRAGSVASQSIIAYTMSLGAENSVAYSNNSIAIPTNFTISV
TTEILPVSMTKTSVDCTMYICGDSTECSNLLLQYGSFCTQLNRALTGIAVEQDKNTQEVFAQVKQIYKTPPIKDFGGFNFS
QILPDPSKPSKRSFIEDLLFNKVTLADAGFIKQYGDCLGDIAARDLICAQKFNGLTVLPPLLTDEMIAQYTSALLACTITSG
WTCGAGPALQIPFAMQMAYRFNGIGVTQNVLYENQKLIANQFNSAIGKIQDSLSSTPSALGKLQDVVNQNAQALNTL
VKQLSSNFGAISSVLNDILSRLDPPEAEVQIDRLITGRLQSLQTYVTQQLIRAAEIRASANLAATKMSECVLGQSKRVDFC
GKGYHLMSFPQSAPHGVVFLHVTYVPAQEKNFTTAPAICHDGKAHFPREGVFVSNGTHWFVTQRNFYEPQIITTDNTF
VSGNCDVVIGIVNNTVYDPLQPELDSFKEELDKYFKNHTSPDVDLGDISGINASVVNIQKEIDRLNEVAKNLNESLIDLQE
LGKYEQGSGYIPEAPRDGQAYVRKDGEWVLLSTFLGRSLEVLFQGPGSLPETGGGSDYKDDDDKGGGGSGGGGSGGG
GSGGGGSGGGGSHHHHHH
SEQ ID NO 186: SEQ ID NO 3 + A942P + A892P + D614N + N532P + S884C + A893C
MFVFLVLLPLVSSQCVNLTTRTQLPPAYTNSFTRGVYYPDKVFRSSVLHSTQDLFLPFFSNVTWFHAIHVSGTNGTKRFD
NPVLPFNDGVYFASTEKSNIIRGWIFGTTLDSKTQSLLIVNNATNVVIKVCEFQFCNDPFLGVYYHKNNKSWMESEFRVY
SSANNCTFEYVSQPFLMDLEGKQGNFKNLREFVFKNIDGYFKIYSKHTPINLVRDLPQGFSALEPLVDLPIGINITRFQTLL
ALHRSYLTPGDSSSGWTAGAAAYYVGYLQPRTFLLKYNENGTITDAVDCALDPLSETKCTLKSFTVEKGIYQTSNFRVQP
TESIVRFPNITNLCPFGEVFNATRFASVYAWNRKRISNCVADYSVLYNSASFSTFKCYGVSPTKLNDLCFTNVYADSFVIR
GDEVRQIAPGQTGKIADYNYKLPDDFTGCVIAWNSNNLDSKVGGNYNYLYRLFRKSNLKPFERDISTEIYQAGSTPCNG
VEGFNCYFPLQSYGFQPTNGVGYQPYRVVVLSFELLHAPATVCGPKKSTPLVKNKCVNFNFNGLTGTGVLTESNKKFLP
FQQFGRDIADTTDAVRDPQTLEILDITPCSFGGVSVITPGTNTSNQVAVLYQNVNCTEVPVAIHADQLTPTWRVYSTGS
NVFQTRAGCLIGAEHVNNSYECDIPIGAGICASYQTQTNSPSRAGSVASQSIIAYTMSLGAENSVAYSNNSIAIPTNFTISV
TTEILPVSMTKTSVDCTMYICGDSTECSNLLLQYGSFCTQLNRALTGIAVEQDKNTQEVFAQVKQIYKTPPIKDFGGFNFS
QILPDPSKPSKRSFIEDLLFNKVTLADAGFIKQYGDCLGDIAARDLICAQKFNGLTVLPPLLTDEMIAQYTSALLAGTITCG
WTFGAGPCLQIPFAMQMAYRFNGIGVTQNVLYENQKLIANQFNSAIGKIQDSLSSTPSALGKLQDVVNQNAQALNTL
VKQLSSNFGAISSVLNDILSRLDPPEAEVQIDRLITGRLQSLQTYVTQQLIRAAEIRASANLAATKMSECVLGQSKRVDFC
GKGYHLMSFPQSAPHGVVFLHVTYVPAQEKNFTTAPAICHDGKAHFPREGVFVSNGTHWFVTQRNFYEPQIITTDNTF
VSGNCDVVIGIVNNTVYDPLQPELDSFKEELDKYFKNHTSPDVDLGDISGINASVVNIQKEIDRLNEVAKNLNESLIDLQE
LGKYEQGSGYIPEAPRDGQAYVRKDGEWVLLSTFLGRSLEVLFQGPGSLPETGGGSDYKDDDDKGGGGSGGGGSGGG
GSGGGGSGGGGSHHHHHH
SEQ ID NO 187: SEQ ID NO 3 + A942P + A892P + T572I + N532P + G880C + F888C
MFVFLVLLPLVSSQCVNLTTRTQLPPAYTNSFTRGVYYPDKVFRSSVLHSTQDLFLPFFSNVTWFHAIHVSGTNGTKRFD
NPVLPFNDGVYFASTEKSNIIRGWIFGTTLDSKTQSLLIVNNATNVVIKVCEFQFCNDPFLGVYYHKNNKSWMESEFRVY
SSANNCTFEYVSQPFLMDLEGKQGNFKNLREFVFKNIDGYFKIYSKHTPINLVRDLPQGFSALEPLVDLPIGINITRFQTLL
ALHRSYLTPGDSSSGWTAGAAAYYVGYLQPRTFLLKYNENGTITDAVDCALDPLSETKCTLKSFTVEKGIYQTSNFRVQP
TESIVRFPNITNLCPFGEVFNATRFASVYAWNRKRISNCVADYSVLYNSASFSTFKCYGVSPTKLNDLCFTNVYADSFVIR
GDEVRQIAPGQTGKIADYNYKLPDDFTGCVIAWNSNNLDSKVGGNYNYLYRLFRKSNLKPFERDISTEIYQAGSTPCNG
VEGFNCYFPLQSYGFQPTNGVGYQPYRVVVLSFELLHAPATVCGPKKSTPLVKNKCVNFNFNGLTGTGVLTESNKKFLP
FQQFGRDIADITDAVRDPQTLEILDITPCSFGGVSVITPGTNTSNQVAVLYQDVNCTEVPVAIHADQLTPTWRVYSTGS
NVFQTRAGCLIGAEHVNNSYECDIPIGAGICASYQTQTNSPSRAGSVASQSIIAYTMSLGAENSVAYSNNSIAIPTNFTISV
TTEILPVSMTKTSVDCTMYICGDSTECSNLLLQYGSFCTQLNRALTGIAVEQDKNTQEVFAQVKQIYKTPPIKDFGGFNFS
QILPDPSKPSKRSFIEDLLFNKVTLADAGFIKQYGDCLGDIAARDLICAQKFNGLTVLPPLLTDEMIAQYTSALLACTITSG
WTCGAGPALQIPFAMQMAYRFNGIGVTQNVLYENQKLIANQFNSAIGKIQDSLSSTPSALGKLQDVVNQNAQALNTL
VKQLSSNFGAISSVLNDILSRLDPPEAEVQIDRLITGRLQSLQTYVTQQLIRAAEIRASANLAATKMSECVLGQSKRVDFC
GKGYHLMSFPQSAPHGVVFLHVTYVPAQEKNFTTAPAICHDGKAHFPREGVFVSNGTHWFVTQRNFYEPQIITTDNTF
VSGNCDVVIGIVNNTVYDPLQPELDSFKEELDKYFKNHTSPDVDLGDISGINASVVNIQKEIDRLNEVAKNLNESLIDLQE
LGKYEQGSGYIPEAPRDGQAYVRKDGEWVLLSTFLGRSLEVLFQGPGSLPETGGGSDYKDDDDKGGGGSGGGGSGGG
GSGGGGSGGGGSHHHHHH
SEQ ID NO 188: SEQ ID NO 3 + A942P + A892P + T572I + N532P + S884C + A893C
MFVFLVLLPLVSSQCVNLTTRTQLPPAYTNSFTRGVYYPDKVFRSSVLHSTQDLFLPFFSNVTWFHAIHVSGTNGTKRFD
NPVLPFNDGVYFASTEKSNIIRGWIFGTTLDSKTQSLLIVNNATNVVIKVCEFQFCNDPFLGVYYHKNNKSWMESEFRVY
SSANNCTFEYVSQPFLMDLEGKQGNFKNLREFVFKNIDGYFKIYSKHTPINLVRDLPQGFSALEPLVDLPIGINITRFQTLL
ALHRSYLTPGDSSSGWTAGAAAYYVGYLQPRTFLLKYNENGTITDAVDCALDPLSETKCTLKSFTVEKGIYQTSNFRVQP
TESIVRFPNITNLCPFGEVFNATRFASVYAWNRKRISNCVADYSVLYNSASFSTFKCYGVSPTKLNDLCFTNVYADSFVIR
GDEVRQIAPGQTGKIADYNYKLPDDFTGCVIAWNSNNLDSKVGGNYNYLYRLFRKSNLKPFERDISTEIYQAGSTPCNG
VEGFNCYFPLQSYGFQPTNGVGYQPYRVVVLSFELLHAPATVCGPKKSTPLVKNKCVNFNFNGLTGTGVLTESNKKFLP
FQQFGRDIADITDAVRDPQTLEILDITPCSFGGVSVITPGTNTSNQVAVLYQDVNCTEVPVAIHADQLTPTWRVYSTGS
NVFQTRAGCLIGAEHVNNSYECDIPIGAGICASYQTQTNSPSRAGSVASQSIIAYTMSLGAENSVAYSNNSIAIPTNFTISV
TTEILPVSMTKTSVDCTMYICGDSTECSNLLLQYGSFCTQLNRALTGIAVEQDKNTQEVFAQVKQIYKTPPIKDFGGFNFS
QILPDPSKPSKRSFIEDLLFNKVTLADAGFIKQYGDCLGDIAARDLICAQKFNGLTVLPPLLTDEMIAQYTSALLAGTITCG
WTFGAGPCLQIPFAMQMAYRFNGIGVTQNVLYENQKLIANQFNSAIGKIQDSLSSTPSALGKLQDVVNQNAQALNTL
VKQLSSNFGAISSVLNDILSRLDPPEAEVQIDRLITGRLQSLQTYVTQQLIRAAEIRASANLAATKMSECVLGQSKRVDFC
GKGYHLMSFPQSAPHGVVFLHVTYVPAQEKNFTTAPAICHDGKAHFPREGVFVSNGTHWFVTQRNFYEPQIITTDNTF
VSGNCDVVIGIVNNTVYDPLQPELDSFKEELDKYFKNHTSPDVDLGDISGINASVVNIQKEIDRLNEVAKNLNESLIDLQE
LGKYEQGSGYIPEAPRDGQAYVRKDGEWVLLSTFLGRSLEVLFQGPGSLPETGGGSDYKDDDDKGGGGSGGGGSGGG
GSGGGGSGGGGSHHHHHH
SEQ ID NO 189: SEQ ID NO 3 + A942P + D614N + T572I + N532P + G880C + F888C
MFVFLVLLPLVSSQCVNLTTRTQLPPAYTNSFTRGVYYPDKVFRSSVLHSTQDLFLPFFSNVTWFHAIHVSGTNGTKRFD
NPVLPFNDGVYFASTEKSNIIRGWIFGTTLDSKTQSLLIVNNATNVVIKVCEFQFCNDPFLGVYYHKNNKSWMESEFRVY
SSANNCTFEYVSQPFLMDLEGKQGNFKNLREFVFKNIDGYFKIYSKHTPINLVRDLPQGFSALEPLVDLPIGINITRFQTLL
ALHRSYLTPGDSSSGWTAGAAAYYVGYLQPRTFLLKYNENGTITDAVDCALDPLSETKCTLKSFTVEKGIYQTSNFRVQP
TESIVRFPNITNLCPFGEVFNATRFASVYAWNRKRISNCVADYSVLYNSASFSTFKCYGVSPTKLNDLCFTNVYADSFVIR
GDEVRQIAPGQTGKIADYNYKLPDDFTGCVIAWNSNNLDSKVGGNYNYLYRLFRKSNLKPFERDISTEIYQAGSTPCNG
VEGFNCYFPLQSYGFQPTNGVGYQPYRVVVLSFELLHAPATVCGPKKSTPLVKNKCVNFNFNGLTGTGVLTESNKKFLP
FQQFGRDIADITDAVRDPQTLEILDITPCSFGGVSVITPGTNTSNQVAVLYQNVNCTEVPVAIHADQLTPTWRVYSTGS
NVFQTRAGCLIGAEHVNNSYECDIPIGAGICASYQTQTNSPSRAGSVASQSIIAYTMSLGAENSVAYSNNSIAIPTNFTISV
TTEILPVSMTKTSVDCTMYICGDSTECSNLLLQYGSFCTQLNRALTGIAVEQDKNTQEVFAQVKQIYKTPPIKDFGGFNFS
QILPDPSKPSKRSFIEDLLFNKVTLADAGFIKQYGDCLGDIAARDLICAQKFNGLTVLPPLLTDEMIAQYTSALLACTITSG
WTCGAGAALQIPFAMQMAYRFNGIGVTQNVLYENQKLIANQFNSAIGKIQDSLSSTPSALGKLQDVVNQNAQALNTL
VKQLSSNFGAISSVLNDILSRLDPPEAEVQIDRLITGRLQSLQTYVTQQLIRAAEIRASANLAATKMSECVLGQSKRVDFC
GKGYHLMSFPQSAPHGVVFLHVTYVPAQEKNFTTAPAICHDGKAHFPREGVFVSNGTHWFVTQRNFYEPQIITTDNTF
VSGNCDVVIGIVNNTVYDPLQPELDSFKEELDKYFKNHTSPDVDLGDISGINASVVNIQKEIDRLNEVAKNLNESLIDLQE
LGKYEQGSGYIPEAPRDGQAYVRKDGEWVLLSTFLGRSLEVLFQGPGSLPETGGGSDYKDDDDKGGGGSGGGGSGGG
GSGGGGSGGGGSHHHHHH
SEQ ID NO 190: SEQ ID NO 3 + A942P + D614N + T572I + N532P + S884C + A893C
MFVFLVLLPLVSSQCVNLTTRTQLPPAYTNSFTRGVYYPDKVFRSSVLHSTQDLFLPFFSNVTWFHAIHVSGTNGTKRFD
NPVLPFNDGVYFASTEKSNIIRGWIFGTTLDSKTQSLLIVNNATNVVIKVCEFQFCNDPFLGVYYHKNNKSWMESEFRVY
SSANNCTFEYVSQPFLMDLEGKQGNFKNLREFVFKNIDGYFKIYSKHTPINLVRDLPQGFSALEPLVDLPIGINITRFQTLL
ALHRSYLTPGDSSSGWTAGAAAYYVGYLQPRTFLLKYNENGTITDAVDCALDPLSETKCTLKSFTVEKGIYQTSNFRVQP
TESIVRFPNITNLCPFGEVFNATRFASVYAWNRKRISNCVADYSVLYNSASFSTFKCYGVSPTKLNDLCFTNVYADSFVIR
GDEVRQIAPGQTGKIADYNYKLPDDFTGCVIAWNSNNLDSKVGGNYNYLYRLFRKSNLKPFERDISTEIYQAGSTPCNG
VEGFNCYFPLQSYGFQPTNGVGYQPYRVVVLSFELLHAPATVCGPKKSTPLVKNKCVNFNFNGLTGTGVLTESNKKFLP
FQQFGRDIADITDAVRDPQTLEILDITPCSFGGVSVITPGTNTSNQVAVLYQNVNCTEVPVAIHADQLTPTWRVYSTGS
NVFQTRAGCLIGAEHVNNSYECDIPIGAGICASYQTQTNSPSRAGSVASQSIIAYTMSLGAENSVAYSNNSIAIPTNFTISV
TTEILPVSMTKTSVDCTMYICGDSTECSNLLLQYGSFCTQLNRALTGIAVEQDKNTQEVFAQVKQIYKTPPIKDFGGFNFS
QILPDPSKPSKRSFIEDLLFNKVTLADAGFIKQYGDCLGDIAARDLICAQKFNGLTVLPPLLTDEMIAQYTSALLAGTITCG
WTFGAGACLQIPFAMQMAYRFNGIGVTQNVLYENQKLIANQFNSAIGKIQDSLSSTPSALGKLQDVVNQNAQALNTL
VKQLSSNFGAISSVLNDILSRLDPPEAEVQIDRLITGRLQSLQTYVTQQLIRAAEIRASANLAATKMSECVLGQSKRVDFC
GKGYHLMSFPQSAPHGVVFLHVTYVPAQEKNFTTAPAICHDGKAHFPREGVFVSNGTHWFVTQRNFYEPQIITTDNTF
VSGNCDVVIGIVNNTVYDPLQPELDSFKEELDKYFKNHTSPDVDLGDISGINASVVNIQKEIDRLNEVAKNLNESLIDLQE
LGKYEQGSGYIPEAPRDGQAYVRKDGEWVLLSTFLGRSLEVLFQGPGSLPETGGGSDYKDDDDKGGGGSGGGGSGGG
GSGGGGSGGGGSHHHHHH
SEQ ID NO 191: SEQ ID NO 3 + A892P + D614N + T572I + N532P + G880C + F888C
MFVFLVLLPLVSSQCVNLTTRTQLPPAYTNSFTRGVYYPDKVFRSSVLHSTQDLFLPFFSNVTWFHAIHVSGTNGTKRFD
NPVLPFNDGVYFASTEKSNIIRGWIFGTTLDSKTQSLLIVNNATNVVIKVCEFQFCNDPFLGVYYHKNNKSWMESEFRVY
SSANNCTFEYVSQPFLMDLEGKQGNFKNLREFVFKNIDGYFKIYSKHTPINLVRDLPQGFSALEPLVDLPIGINITRFQTLL
ALHRSYLTPGDSSSGWTAGAAAYYVGYLQPRTFLLKYNENGTITDAVDCALDPLSETKCTLKSFTVEKGIYQTSNFRVQP
TESIVRFPNITNLCPFGEVFNATRFASVYAWNRKRISNCVADYSVLYNSASFSTFKCYGVSPTKLNDLCFTNVYADSFVIR
GDEVRQIAPGQTGKIADYNYKLPDDFTGCVIAWNSNNLDSKVGGNYNYLYRLFRKSNLKPFERDISTEIYQAGSTPCNG
VEGFNCYFPLQSYGFQPTNGVGYQPYRVVVLSFELLHAPATVCGPKKSTPLVKNKCVNFNFNGLTGTGVLTESNKKFLP
FQQFGRDIADITDAVRDPQTLEILDITPCSFGGVSVITPGTNTSNQVAVLYQNVNCTEVPVAIHADQLTPTWRVYSTGS
NVFQTRAGCLIGAEHVNNSYECDIPIGAGICASYQTQTNSPSRAGSVASQSIIAYTMSLGAENSVAYSNNSIAIPTNFTISV
TTEILPVSMTKTSVDCTMYICGDSTECSNLLLQYGSFCTQLNRALTGIAVEQDKNTQEVFAQVKQIYKTPPIKDFGGFNFS
QILPDPSKPSKRSFIEDLLFNKVTLADAGFIKQYGDCLGDIAARDLICAQKFNGLTVLPPLLTDEMIAQYTSALLACTITSG
WTCGAGPALQIPFAMQMAYRFNGIGVTQNVLYENQKLIANQFNSAIGKIQDSLSSTASALGKLQDVVNQNAQALNTL
VKQLSSNFGAISSVLNDILSRLDPPEAEVQIDRLITGRLQSLQTYVTQQLIRAAEIRASANLAATKMSECVLGQSKRVDFC
GKGYHLMSFPQSAPHGVVFLHVTYVPAQEKNFTTAPAICHDGKAHFPREGVFVSNGTHWFVTQRNFYEPQIITTDNTF
VSGNCDVVIGIVNNTVYDPLQPELDSFKEELDKYFKNHTSPDVDLGDISGINASVVNIQKEIDRLNEVAKNLNESLIDLQE
LGKYEQGSGYIPEAPRDGQAYVRKDGEWVLLSTFLGRSLEVLFQGPGSLPETGGGSDYKDDDDKGGGGSGGGGSGGG
GSGGGGSGGGGSHHHHHH
SEQ ID NO 192: SEQ ID NO 3 + A892P + D614N + T572I + N532P + S884C + A893C
MFVFLVLLPLVSSQCVNLTTRTQLPPAYTNSFTRGVYYPDKVFRSSVLHSTQDLFLPFFSNVTWFHAIHVSGTNGTKRFD
NPVLPFNDGVYFASTEKSNIIRGWIFGTTLDSKTQSLLIVNNATNVVIKVCEFQFCNDPFLGVYYHKNNKSWMESEFRVY
SSANNCTFEYVSQPFLMDLEGKQGNFKNLREFVFKNIDGYFKIYSKHTPINLVRDLPQGFSALEPLVDLPIGINITRFQTLL
ALHRSYLTPGDSSSGWTAGAAAYYVGYLQPRTFLLKYNENGTITDAVDCALDPLSETKCTLKSFTVEKGIYQTSNFRVQP
TESIVRFPNITNLCPFGEVFNATRFASVYAWNRKRISNCVADYSVLYNSASFSTFKCYGVSPTKLNDLCFTNVYADSFVIR
GDEVRQIAPGQTGKIADYNYKLPDDFTGCVIAWNSNNLDSKVGGNYNYLYRLFRKSNLKPFERDISTEIYQAGSTPCNG
VEGFNCYFPLQSYGFQPTNGVGYQPYRVVVLSFELLHAPATVCGPKKSTPLVKNKCVNFNFNGLTGTGVLTESNKKFLP
FQQFGRDIADITDAVRDPQTLEILDITPCSFGGVSVITPGTNTSNQVAVLYQNVNCTEVPVAIHADQLTPTWRVYSTGS
NVFQTRAGCLIGAEHVNNSYECDIPIGAGICASYQTQTNSPSRAGSVASQSIIAYTMSLGAENSVAYSNNSIAIPTNFTISV
TTEILPVSMTKTSVDCTMYICGDSTECSNLLLQYGSFCTQLNRALTGIAVEQDKNTQEVFAQVKQIYKTPPIKDFGGFNFS
QILPDPSKPSKRSFIEDLLFNKVTLADAGFIKQYGDCLGDIAARDLICAQKFNGLTVLPPLLTDEMIAQYTSALLAGTITCG
WTFGAGPCLQIPFAMQMAYRFNGIGVTQNVLYENQKLIANQFNSAIGKIQDSLSSTASALGKLQDVVNQNAQALNTL
VKQLSSNFGAISSVLNDILSRLDPPEAEVQIDRLITGRLQSLQTYVTQQLIRAAEIRASANLAATKMSECVLGQSKRVDFC
GKGYHLMSFPQSAPHGVVFLHVTYVPAQEKNFTTAPAICHDGKAHFPREGVFVSNGTHWFVTQRNFYEPQIITTDNTF
VSGNCDVVIGIVNNTVYDPLQPELDSFKEELDKYFKNHTSPDVDLGDISGINASVVNIQKEIDRLNEVAKNLNESLIDLQE
LGKYEQGSGYIPEAPRDGQAYVRKDGEWVLLSTFLGRSLEVLFQGPGSLPETGGGSDYKDDDDKGGGGSGGGGSGGG
GSGGGGSGGGGSHHHHHH
SEQ ID NO 193: SEQ ID NO 3 + A942P + A892P + D614N + T572I + N532P + G880C + F888C
MFVFLVLLPLVSSQCVNLTTRTQLPPAYTNSFTRGVYYPDKVFRSSVLHSTQDLFLPFFSNVTWFHAIHVSGTNGTKRFD
NPVLPFNDGVYFASTEKSNIIRGWIFGTTLDSKTQSLLIVNNATNVVIKVCEFQFCNDPFLGVYYHKNNKSWMESEFRVY
SSANNCTFEYVSQPFLMDLEGKQGNFKNLREFVFKNIDGYFKIYSKHTPINLVRDLPQGFSALEPLVDLPIGINITRFQTLL
ALHRSYLTPGDSSSGWTAGAAAYYVGYLQPRTFLLKYNENGTITDAVDCALDPLSETKCTLKSFTVEKGIYQTSNFRVQP
TESIVRFPNITNLCPFGEVFNATRFASVYAWNRKRISNCVADYSVLYNSASFSTFKCYGVSPTKLNDLCFTNVYADSFVIR
GDEVRQIAPGQTGKIADYNYKLPDDFTGCVIAWNSNNLDSKVGGNYNYLYRLFRKSNLKPFERDISTEIYQAGSTPCNG
VEGFNCYFPLQSYGFQPTNGVGYQPYRVVVLSFELLHAPATVCGPKKSTPLVKNKCVNFNFNGLTGTGVLTESNKKFLP
FQQFGRDIADITDAVRDPQTLEILDITPCSFGGVSVITPGTNTSNQVAVLYQNVNCTEVPVAIHADQLTPTWRVYSTGS
NVFQTRAGCLIGAEHVNNSYECDIPIGAGICASYQTQTNSPSRAGSVASQSIIAYTMSLGAENSVAYSNNSIAIPTNFTISV
TTEILPVSMTKTSVDCTMYICGDSTECSNLLLQYGSFCTQLNRALTGIAVEQDKNTQEVFAQVKQIYKTPPIKDFGGFNFS
QILPDPSKPSKRSFIEDLLFNKVTLADAGFIKQYGDCLGDIAARDLICAQKFNGLTVLPPLLTDEMIAQYTSALLACTITSG
WTCGAGPALQIPFAMQMAYRFNGIGVTQNVLYENQKLIANQFNSAIGKIQDSLSSTPSALGKLQDVVNQNAQALNTL
VKQLSSNFGAISSVLNDILSRLDPPEAEVQIDRLITGRLQSLQTYVTQQLIRAAEIRASANLAATKMSECVLGQSKRVDFC
GKGYHLMSFPQSAPHGVVFLHVTYVPAQEKNFTTAPAICHDGKAHFPREGVFVSNGTHWFVTQRNFYEPQIITTDNTF
VSGNCDVVIGIVNNTVYDPLQPELDSFKEELDKYFKNHTSPDVDLGDISGINASVVNIQKEIDRLNEVAKNLNESLIDLQE
LGKYEQGSGYIPEAPRDGQAYVRKDGEWVLLSTFLGRSLEVLFQGPGSLPETGGGSDYKDDDDKGGGGSGGGGSGGG
GSGGGGSGGGGSHHHHHH
SEQ ID NO 194: SEQ ID NO 3 + A942P + A892P + D614N + T572I + N532P + S884C + A893C
MFVFLVLLPLVSSQCVNLTTRTQLPPAYTNSFTRGVYYPDKVFRSSVLHSTQDLFLPFFSNVTWFHAIHVSGTNGTKRFD
NPVLPFNDGVYFASTEKSNIIRGWIFGTTLDSKTQSLLIVNNATNVVIKVCEFQFCNDPFLGVYYHKNNKSWMESEFRVY
SSANNCTFEYVSQPFLMDLEGKQGNFKNLREFVFKNIDGYFKIYSKHTPINLVRDLPQGFSALEPLVDLPIGINITRFQTLL
ALHRSYLTPGDSSSGWTAGAAAYYVGYLQPRTFLLKYNENGTITDAVDCALDPLSETKCTLKSFTVEKGIYQTSNFRVQP
TESIVRFPNITNLCPFGEVFNATRFASVYAWNRKRISNCVADYSVLYNSASFSTFKCYGVSPTKLNDLCFTNVYADSFVIR
GDEVRQIAPGQTGKIADYNYKLPDDFTGCVIAWNSNNLDSKVGGNYNYLYRLFRKSNLKPFERDISTEIYQAGSTPCNG
VEGFNCYFPLQSYGFQPTNGVGYQPYRVVVLSFELLHAPATVCGPKKSTPLVKNKCVNFNFNGLTGTGVLTESNKKFLP
FQQFGRDIADITDAVRDPQTLEILDITPCSFGGVSVITPGTNTSNQVAVLYQNVNCTEVPVAIHADQLTPTWRVYSTGS
NVFQTRAGCLIGAEHVNNSYECDIPIGAGICASYQTQTNSPSRAGSVASQSIIAYTMSLGAENSVAYSNNSIAIPTNFTISV
TTEILPVSMTKTSVDCTMYICGDSTECSNLLLQYGSFCTQLNRALTGIAVEQDKNTQEVFAQVKQIYKTPPIKDFGGFNFS
QILPDPSKPSKRSFIEDLLFNKVTLADAGFIKQYGDCLGDIAARDLICAQKFNGLTVLPPLLTDEMIAQYTSALLAGTITCG
WTFGAGPCLQIPFAMQMAYRFNGIGVTQNVLYENQKLIANQFNSAIGKIQDSLSSTPSALGKLQDVVNQNAQALNTL
VKQLSSNFGAISSVLNDILSRLDPPEAEVQIDRLITGRLQSLQTYVTQQLIRAAEIRASANLAATKMSECVLGQSKRVDFC
GKGYHLMSFPQSAPHGVVFLHVTYVPAQEKNFTTAPAICHDGKAHFPREGVFVSNGTHWFVTQRNFYEPQIITTDNTF
VSGNCDVVIGIVNNTVYDPLQPELDSFKEELDKYFKNHTSPDVDLGDISGINASVVNIQKEIDRLNEVAKNLNESLIDLQE
LGKYEQGSGYIPEAPRDGQAYVRKDGEWVLLSTFLGRS LEVLFQGPGS LPETGGGSDYKDDDDKGGGGSGGGGSGGG
GSGGGGSGGGGSHHHHHH
SEQ ID NO: 195 coding sequence for a short signal peptide from a Corona virus
ATGTTCGTGTTTCTGGTGCTGCTGCCTCTGGTGTCCAGC
SEQ ID NO: 196, 265 minimal promoter
CTCTCTACGGCTAACCTGAATGGA
SEQ ID NO: 197, T7 promoter
TAATACGACTCACTATAG
SEQ ID NO: 198, 5-UTR
ATAGGCGGCGCATGAGAGAAGCCCAGACCAATTACCTACCCAAA
SEQ ID NO: 199, Alpha 5′ replication seq from nsP1
TAGGAGAAAGTTCACGTTGACATCGAGGAAGACAGCCCATTCCTCAGAGCTTTGCAGCGGAGCTTCCCGCAGTTT
GAGGTAGAAGCCAAGCAGGTCACTGATAATGACCATGCTAATGCCAGAGCGTTTTCGCATCTGGCTTCAAAACTG
ATCGAAACGGAGGTGGACCCATCCGACACGATCCTTGACATTGGA
SEQ ID NO: 200, gDLP
ATAGTCAGCATAGTACATTTCATCTGACTAATACTACAACACCACCACCATGAATAGAGGATTCTTTAACATGCTCG
GCCGCCGCCCCTTCCCGGCCCCCACTGCCATGTGGAGGCCGCGGAGAAGGAGGCAGGCGGCCCCG
SEQ ID NO: 201, P2A
GGAAGCGGAGCTACTAACTTCAGCCTGCTGAAGCAGGCTGGAGACGTGGAGGAGAACCCTGGACCT
SEQ ID NO: 202, P2A
GSGATNFSLLKQAGDVEENPGP
SEQ ID NO: 203, DLPnsp ORF encoding a 3′ portion of gDLP, P2A and nsp1-3
ATGAATAGAGGATTCTTTAACATGCTCGGCCGCCGCCCCTTCCCGGCCCCCACTGCCATGTGGAGGCCGCGGAGA
AGGAGGCAGGCGGCCCCGGGAAGCGGAGCTACTAACTTCAGCCTGCTGAAGCAGGCTGGAGACGTGGAGGAGA
ACCCTGGACCTGAGAAAGTTCACGTTGACATCGAGGAAGACAGCCCATTCCTCAGAGCTTTGCAGCGGAGCTTCC
CGCAGTTTGAGGTAGAAGCCAAGCAGGTCACTGATAATGACCATGCTAATGCCAGAGCGTTTTCGCATCTGGCTTC
AAAACTGATCGAAACGGAGGTGGACCCATCCGACACGATCCTTGACATTGGAAGTGCGCCCGCCCGCAGAATGTA
TTCTAAGCACAAGTATCATTGTATCTGTCCGATGAGATGTGCGGAAGATCCGGACAGATTGTATAAGTATGCAACT
AAGCTGAAGAAAAACTGTAAGGAAATAACTGATAAGGAATTGGACAAGAAAATGAAGGAGCTCGCCGCCGTCAT
GAGCGACCCTGACCTGGAAACTGAGACTATGTGCCTCCACGACGACGAGTCGTGTCGCTACGAAGGGCAAGTCGC
TGTTTACCAGGATGTATACGCGGTTGACGGACCGACAAGTCTCTATCACCAAGCCAATAAGGGAGTTAGAGTCGC
CTACTGGATAGGCTTTGACACCACCCCTTTTATGTTTAAGAACTTGGCTGGAGCATATCCATCATACTCTACCAACT
GGGCCGACGAAACCGTGTTAACGGCTCGTAACATAGGCCTATGCAGCTCTGACGTTATGGAGCGGTCACGTAGAG
GGATGTCCATTCTTAGAAAGAAGTATTTGAAACCATCCAACAATGTTCTATTCTCTGTTGGCTCGACCATCTACCAC
GAGAAGAGGGACTTACTGAGGAGCTGGCACCTGCCGTCTGTATTTCACTTACGTGGCAAGCAAAATTACACATGT
CGGTGTGAGACTATAGTTAGTTGCGACGGGTACGTCGTTAAAAGAATAGCTATCAGTCCAGGCCTGTATGGGAAG
CCTTCAGGCTATGCTGCTACGATGCACCGCGAGGGATTCTTGTGCTGCAAAGTGACAGACACATTGAACGGGGAG
AGGGTCTCTTTTCCCGTGTGCACGTATGTGCCAGCTACATTGTGTGACCAAATGACTGGCATACTGGCAACAGATG
TCAGTGCGGACGACGCGCAAAAACTGCTGGTTGGGCTCAACCAGCGTATAGTCGTCAACGGTCGCACCCAGAGAA
ACACCAATACCATGAAAAATTACCTTTTGCCCGTAGTGGCCCAGGCATTTGCTAGGTGGGCAAAGGAATATAAGG
AAGATCAAGAAGATGAAAGGCCACTAGGACTACGAGATAGACAGTTAGTCATGGGGTGTTGTTGGGCTTTTAGAA
GGCACAAGATAACATCTATTTATAAGCGCCCGGATACCCAAACCATCATCAAAGTGAACAGCGATTTCCACTCATT
CGTGCTGCCCAGGATAGGCAGTAACACATTGGAGATCGGGCTGAGAACAAGAATCAGGAAAATGTTAGAGGAGC
ACAAGGAGCCGTCACCTCTCATTACCGCCGAGGACGTACAAGAAGCTAAGTGCGCAGCCGATGAGGCTAAGGAG
GTGCGTGAAGCCGAGGAGTTGCGCGCAGCTCTACCACCTTTGGCAGCTGATGTTGAGGAGCCCACTCTGGAAGCC
GATGTCGACTTGATGTTACAAGAGGCTGGGGCCGGCTCAGTGGAGACACCTCGTGGCTTGATAAAGGTTACCAGC
TACGATGGCGAGGACAAGATCGGCTCTTACGCTGTGCTTTCTCCGCAGGCTGTACTCAAGAGTGAAAAATTATCTT
GCATCCACCCTCTCGCTGAACAAGTCATAGTGATAACACACTCTGGCCGAAAAGGGCGTTATGCCGTGGAACCATA
CCATGGTAAAGTAGTGGTGCCAGAGGGACATGCAATACCCGTCCAGGACTTTCAAGCTCTGAGTGAAAGTGCCAC
CATTGTGTACAACGAACGTGAGTTCGTAAACAGGTACCTGCACCATATTGCCACACATGGAGGAGCGCTGAACAC
TGATGAAGAATATTACAAAACTGTCAAGCCCAGCGAGCACGACGGCGAATACCTGTACGACATCGACAGGAAACA
GTGCGTCAAGAAAGAACTAGTCACTGGGCTAGGGCTCACAGGCGAGCTGGTGGATCCTCCCTTCCATGAATTCGC
CTACGAGAGTCTGAGAACACGACCAGCCGCTCCTTACCAAGTACCAACCATAGGGGTGTATGGCGTGCCAGGATC
AGGCAAGTCTGGCATCATTAAAAGCGCAGTCACCAAAAAAGATCTAGTGGTGAGCGCCAAGAAAGAAAACTGTG
CAGAAATTATAAGGGACGTCAAGAAAATGAAAGGGCTGGACGTCAATGCCAGAACTGTGGACTCAGTGCTCTTGA
ATGGATGCAAACACCCCGTAGAGACCCTGTATATTGACGAAGCTTTTGCTTGTCATGCAGGTACTCTCAGAGCGCT
CATAGCCATTATAAGACCTAAAAAGGCAGTGCTCTGCGGGGATCCCAAACAGTGCGGTTTTTTTAACATGATGTGC
CTGAAAGTGCATTTTAACCACGAGATTTGCACACAAGTCTTCCACAAAAGCATCTCTCGCCGTTGCACTAAATCTGT
GACTTCGGTCGTCTCAACCTTGTTTTACGACAAAAAAATGAGAACGACGAATCCGAAAGAGACTAAGATTGTGATT
GACACTACCGGCAGTACCAAACCTAAGCAGGACGATCTCATTCTCACTTGTTTCAGAGGGTGGGTGAAGCAGTTG
CAAATAGATTACAAAGGCAACGAAATAATGACGGCAGCTGCCTCTCAAGGGCTGACCCGTAAAGGTGTGTATGCC
GTTCGGTACAAGGTGAATGAAAATCCTCTGTACGCACCCACCTCTGAACATGTGAACGTCCTACTGACCCGCACGG
AGGACCGCATCGTGTGGAAAACACTAGCCGGCGACCCATGGATAAAAACACTGACTGCCAAGTACCCTGGGAATT
TCACTGCCACGATAGAGGAGTGGCAAGCAGAGCATGATGCCATCATGAGGCACATCTTGGAGAGACCGGACCCT
ACCGACGTCTTCCAGAATAAGGCAAACGTGTGTTGGGCCAAGGCTTTAGTGCCGGTGCTGAAGACCGCTGGCATA
GACATGACCACTGAACAATGGAACACTGTGGATTATTTTGAAACGGACAAAGCTCACTCAGCAGAGATAGTATTG
AACCAACTATGCGTGAGGTTCTTTGGACTCGATCTGGACTCCGGTCTATTTTCTGCACCCACTGTTCCGTTATCCATT
AGGAATAATCACTGGGATAACTCCCCGTCGCCTAACATGTACGGGCTGAATAAAGAAGTGGTCCGTCAGCTCTCTC
GCAGGTACCCACAACTGCCTCGGGCAGTTGCCACTGGAAGAGTCTATGACATGAACACTGGTACACTGCGCAATT
ATGATCCGCGCATAAACCTAGTACCTGTAAACAGAAGACTGCCTCATGCTTTAGTCCTCCACCATAATGAACACCCA
CAGAGTGACTTTTCTTCATTCGTCAGCAAATTGAAGGGCAGAACTGTCCTGGTGGTCGGGGAAAAGTTGTCCGTCC
CAGGCAAAATGGTTGACTGGTTGTCAGACCGGCCTGAGGCTACCTTCAGAGCTCGGCTGGATTTAGGCATCCCAG
GTGATGTGCCCAAATATGACATAATATTTGTTAATGTGAGGACCCCATATAAATACCATCACTATCAGCAGTGTGA
AGACCATGCCATTAAGCTTAGCATGTTGACCAAGAAAGCTTGTCTGCATCTGAATCCCGGCGGAACCTGTGTCAGC
ATAGGTTATGGTTACGCTGACAGGGCCAGCGAAAGCATCATTGGTGCTATAGCGCGGCAGTTCAAGTTTTCCCGG
GTATGCAAACCGAAATCCTCACTTGAAGAGACGGAAGTTCTGTTTGTATTCATTGGGTACGATCGCAAGGCCCGTA
CGCACAATCCTTACAAGCTTTCATCAACCTTGACCAACATTTATACAGGTTCCAGACTCCACGAAGCCGGATGTGCA
CCCTCATATCATGTGGTGCGAGGGGATATTGCCACGGCCACCGAAGGAGTGATTATAAATGCTGCTAACAGCAAA
GGACAACCTGGCGGAGGGGTGTGCGGAGCGCTGTATAAGAAATTCCCGGAAAGCTTCGATTTACAGCCGATCGA
AGTAGGAAAAGCGCGACTGGTCAAAGGTGCAGCTAAACATATCATTCATGCCGTAGGACCAAACTTCAACAAAGT
TTCGGAGGTTGAAGGTGACAAACAGTTGGCAGAGGCTTATGAGTCCATCGCTAAGATTGTCAACGATAACAATTA
CAAGTCAGTAGCGATTCCACTGTTGTCCACCGGCATCTTTTCCGGGAACAAAGATCGACTAACCCAATCATTGAAC
CATTTGCTGACAGCTTTAGACACCACTGATGCAGATGTAGCCATATACTGCAGGGACAAGAAATGGGAAATGACT
CTCAAGGAAGCAGTGGCTAGGAGAGAAGCAGTGGAGGAGATATGCATATCCGACGACTCTTCAGTGACAGAACC
TGATGCAGAGCTGGTGAGGGTGCATCCGAAGAGTTCTTTGGCTGGAAGGAAGGGCTACAGCACAAGCGATGGCA
AAACTTTCTCATATTTGGAAGGGACCAAGTTTCACCAGGCGGCCAAGGATATAGCAGAAATTAATGCCATGTGGCC
CGTTGCAACGGAGGCCAATGAGCAGGTATGCATGTATATCCTCGGAGAAAGCATGAGCAGTATTAGGTCGAAAT
GCCCCGTCGAAGAGTCGGAAGCCTCCACACCACCTAGCACGCTGCCTTGCTTGTGCATCCATGCCATGACTCCAGA
AAGAGTACAGCGCCTAAAAGCCTCACGTCCAGAACAAATTACTGTGTGCTCATCCTTTCCATTGCCGAAGTATAGA
ATCACTGGTGTGCAGAAGATCCAATGCTCCCAGCCTATATTGTTCTCACCGAAAGTGCCTGCGTATATTCATCCAAG
GAAGTATCTCGTGGAAACACCACCGGTAGACGAGACTCCGGAGCCATCGGCAGAGAACCAATCCACAGAGGGGA
CACCTGAACAACCACCACTTATAACCGAGGATGAGACCAGGACTAGAACGCCTGAGCCGATCATCATCGAAGAGG
AAGAAGAGGATAGCATAAGTTTGCTGTCAGATGGCCCGACCCACCAGGTGCTGCAAGTCGAGGCAGACATTCACG
GGCCGCCCTCTGTATCTAGCTCATCCTGGTCCATTCCTCATGCATCCGACTTTGATGTGGACAGTTTATCCATACTTG
ACACCCTGGAGGGAGCTAGCGTGACCAGCGGGGCAACGTCAGCCGAGACTAACTCTTACTTCGCAAAGAGTATG
GAGTTTCTGGCGCGACCGGTGCCTGCGCCTCGAACAGTATTCAGGAACCCTCCACATCCCGCTCCGCGCACAAGAA
CACCGTCACTTGCACCCAGCAGGGCCTGCTCGAGAACCAGCCTAGTTTCCACCCCGCCAGGCGTGAATAGGGTGA
TCACTAGAGAGGAGCTCGAGGCGCTTACCCCGTCACGCACTCCTAGCAGGTCGGTCTCGAGAACCAGCCTGGTCT
CCAACCCGCCAGGCGTAAATAGGGTGATTACAAGAGAGGAGTTTGAGGCGTTCGTAGCACAACAACAATGA
SEQ ID NO: 204, nsp1 coding sequence
GAGAAAGTTCACGTTGACATCGAGGAAGACAGCCCATTCCTCAGAGCTTTGCAGCGGAGCTTCCCGCAGTTTGAG
GTAGAAGCCAAGCAGGTCACTGATAATGACCATGCTAATGCCAGAGCGTTTTCGCATCTGGCTTCAAAACTGATCG
AAACGGAGGTGGACCCATCCGACACGATCCTTGACATTGGAAGTGCGCCCGCCCGCAGAATGTATTCTAAGCACA
AGTATCATTGTATCTGTCCGATGAGATGTGCGGAAGATCCGGACAGATTGTATAAGTATGCAACTAAGCTGAAGA
AAAACTGTAAGGAAATAACTGATAAGGAATTGGACAAGAAAATGAAGGAGCTCGCCGCCGTCATGAGCGACCCT
GACCTGGAAACTGAGACTATGTGCCTCCACGACGACGAGTCGTGTCGCTACGAAGGGCAAGTCGCTGTTTACCAG
GATGTATACGCGGTTGACGGACCGACAAGTCTCTATCACCAAGCCAATAAGGGAGTTAGAGTCGCCTACTGGATA
GGCTTTGACACCACCCCTTTTATGTTTAAGAACTTGGCTGGAGCATATCCATCATACTCTACCAACTGGGCCGACGA
AACCGTGTTAACGGCTCGTAACATAGGCCTATGCAGCTCTGACGTTATGGAGCGGTCACGTAGAGGGATGTCCAT
TCTTAGAAAGAAGTATTTGAAACCATCCAACAATGTTCTATTCTCTGTTGGCTCGACCATCTACCACGAGAAGAGG
GACTTACTGAGGAGCTGGCACCTGCCGTCTGTATTTCACTTACGTGGCAAGCAAAATTACACATGTCGGTGTGAGA
CTATAGTTAGTTGCGACGGGTACGTCGTTAAAAGAATAGCTATCAGTCCAGGCCTGTATGGGAAGCCTTCAGGCT
ATGCTGCTACGATGCACCGCGAGGGATTCTTGTGCTGCAAAGTGACAGACACATTGAACGGGGAGAGGGTCTCTT
TTCCCGTGTGCACGTATGTGCCAGCTACATTGTGTGACCAAATGACTGGCATACTGGCAACAGATGTCAGTGCGGA
CGACGCGCAAAAACTGCTGGTTGGGCTCAACCAGCGTATAGTCGTCAACGGTCGCACCCAGAGAAACACCAATAC
CATGAAAAATTACCTTTTGCCCGTAGTGGCCCAGGCATTTGCTAGGTGGGCAAAGGAATATAAGGAAGATCAAGA
AGATGAAAGGCCACTAGGACTACGAGATAGACAGTTAGTCATGGGGTGTTGTTGGGCTTTTAGAAGGCACAAGA
TAACATCTATTTATAAGCGCCCGGATACCCAAACCATCATCAAAGTGAACAGCGATTTCCACTCATTCGTGCTGCCC
AGGATAGGCAGTAACACATTGGAGATCGGGCTGAGAACAAGAATCAGGAAAATGTTAGAGGAGCACAAGGAGC
CGTCACCTCTCATTACCGCCGAGGACGTACAAGAAGCTAAGTGCGCAGCCGATGAGGCTAAGGAGGTGCGTGAA
GCCGAGGAGTTGCGCGCAGCTCTACCACCTTTGGCAGCTGATGTTGAGGAGCCCACTCTGGAAGCCGATGTCGAC
TTGATGTTACAAGAGGCTGGGGCC
SEQ ID NO: 205, nsp2 coding sequence
GGCTCAGTGGAGACACCTCGTGGCTTGATAAAGGTTACCAGCTACGATGGCGAGGACAAGATCGGCTCTTACGCT
GTGCTTTCTCCGCAGGCTGTACTCAAGAGTGAAAAATTATCTTGCATCCACCCTCTCGCTGAACAAGTCATAGTGAT
AACACACTCTGGCCGAAAAGGGCGTTATGCCGTGGAACCATACCATGGTAAAGTAGTGGTGCCAGAGGGACATG
CAATACCCGTCCAGGACTTTCAAGCTCTGAGTGAAAGTGCCACCATTGTGTACAACGAACGTGAGTTCGTAAACAG
GTACCTGCACCATATTGCCACACATGGAGGAGCGCTGAACACTGATGAAGAATATTACAAAACTGTCAAGCCCAG
CGAGCACGACGGCGAATACCTGTACGACATCGACAGGAAACAGTGCGTCAAGAAAGAACTAGTCACTGGGCTAG
GGCTCACAGGCGAGCTGGTGGATCCTCCCTTCCATGAATTCGCCTACGAGAGTCTGAGAACACGACCAGCCGCTC
CTTACCAAGTACCAACCATAGGGGTGTATGGCGTGCCAGGATCAGGCAAGTCTGGCATCATTAAAAGCGCAGTCA
CCAAAAAAGATCTAGTGGTGAGCGCCAAGAAAGAAAACTGTGCAGAAATTATAAGGGACGTCAAGAAAATGAAA
GGGCTGGACGTCAATGCCAGAACTGTGGACTCAGTGCTCTTGAATGGATGCAAACACCCCGTAGAGACCCTGTAT
ATTGACGAAGCTTTTGCTTGTCATGCAGGTACTCTCAGAGCGCTCATAGCCATTATAAGACCTAAAAAGGCAGTGC
TCTGCGGGGATCCCAAACAGTGCGGTTTTTTTAACATGATGTGCCTGAAAGTGCATTTTAACCACGAGATTTGCAC
ACAAGTCTTCCACAAAAGCATCTCTCGCCGTTGCACTAAATCTGTGACTTCGGTCGTCTCAACCTTGTTTTACGACA
AAAAAATGAGAACGACGAATCCGAAAGAGACTAAGATTGTGATTGACACTACCGGCAGTACCAAACCTAAGCAG
GACGATCTCATTCTCACTTGTTTCAGAGGGTGGGTGAAGCAGTTGCAAATAGATTACAAAGGCAACGAAATAATG
ACGGCAGCTGCCTCTCAAGGGCTGACCCGTAAAGGTGTGTATGCCGTTCGGTACAAGGTGAATGAAAATCCTCTG
TACGCACCCACCTCTGAACATGTGAACGTCCTACTGACCCGCACGGAGGACCGCATCGTGTGGAAAACACTAGCC
GGCGACCCATGGATAAAAACACTGACTGCCAAGTACCCTGGGAATTTCACTGCCACGATAGAGGAGTGGCAAGCA
GAGCATGATGCCATCATGAGGCACATCTTGGAGAGACCGGACCCTACCGACGTCTTCCAGAATAAGGCAAACGTG
TGTTGGGCCAAGGCTTTAGTGCCGGTGCTGAAGACCGCTGGCATAGACATGACCACTGAACAATGGAACACTGTG
GATTATTTTGAAACGGACAAAGCTCACTCAGCAGAGATAGTATTGAACCAACTATGCGTGAGGTTCTTTGGACTCG
ATCTGGACTCCGGTCTATTTTCTGCACCCACTGTTCCGTTATCCATTAGGAATAATCACTGGGATAACTCCCCGTCG
CCTAACATGTACGGGCTGAATAAAGAAGTGGTCCGTCAGCTCTCTCGCAGGTACCCACAACTGCCTCGGGCAGTT
GCCACTGGAAGAGTCTATGACATGAACACTGGTACACTGCGCAATTATGATCCGCGCATAAACCTAGTACCTGTAA
ACAGAAGACTGCCTCATGCTTTAGTCCTCCACCATAATGAACACCCACAGAGTGACTTTTCTTCATTCGTCAGCAAA
TTGAAGGGCAGAACTGTCCTGGTGGTCGGGGAAAAGTTGTCCGTCCCAGGCAAAATGGTTGACTGGTTGTCAGAC
CGGCCTGAGGCTACCTTCAGAGCTCGGCTGGATTTAGGCATCCCAGGTGATGTGCCCAAATATGACATAATATTTG
TTAATGTGAGGACCCCATATAAATACCATCACTATCAGCAGTGTGAAGACCATGCCATTAAGCTTAGCATGTTGAC
CAAGAAAGCTTGTCTGCATCTGAATCCCGGCGGAACCTGTGTCAGCATAGGTTATGGTTACGCTGACAGGGCCAG
CGAAAGCATCATTGGTGCTATAGCGCGGCAGTTCAAGTTTTCCCGGGTATGCAAACCGAAATCCTCACTTGAAGAG
ACGGAAGTTCTGTTTGTATTCATTGGGTACGATCGCAAGGCCCGTACGCACAATCCTTACAAGCTTTCATCAACCTT
GACCAACATTTATACAGGTTCCAGACTCCACGAAGCCGGATGT
SEQ ID NO: 206, nsp3 coding sequence
GCACCCTCATATCATGTGGTGCGAGGGGATATTGCCACGGCCACCGAAGGAGTGATTATAAATGCTGCTAACAGC
AAAGGACAACCTGGCGGAGGGGTGTGCGGAGCGCTGTATAAGAAATTCCCGGAAAGCTTCGATTTACAGCCGAT
CGAAGTAGGAAAAGCGCGACTGGTCAAAGGTGCAGCTAAACATATCATTCATGCCGTAGGACCAAACTTCAACAA
AGTTTCGGAGGTTGAAGGTGACAAACAGTTGGCAGAGGCTTATGAGTCCATCGCTAAGATTGTCAACGATAACAA
TTACAAGTCAGTAGCGATTCCACTGTTGTCCACCGGCATCTTTTCCGGGAACAAAGATCGACTAACCCAATCATTGA
ACCATTTGCTGACAGCTTTAGACACCACTGATGCAGATGTAGCCATATACTGCAGGGACAAGAAATGGGAAATGA
CTCTCAAGGAAGCAGTGGCTAGGAGAGAAGCAGTGGAGGAGATATGCATATCCGACGACTCTTCAGTGACAGAA
CCTGATGCAGAGCTGGTGAGGGTGCATCCGAAGAGTTCTTTGGCTGGAAGGAAGGGCTACAGCACAAGCGATGG
CAAAACTTTCTCATATTTGGAAGGGACCAAGTTTCACCAGGCGGCCAAGGATATAGCAGAAATTAATGCCATGTG
GCCCGTTGCAACGGAGGCCAATGAGCAGGTATGCATGTATATCCTCGGAGAAAGCATGAGCAGTATTAGGTCGA
AATGCCCCGTCGAAGAGTCGGAAGCCTCCACACCACCTAGCACGCTGCCTTGCTTGTGCATCCATGCCATGACTCC
AGAAAGAGTACAGCGCCTAAAAGCCTCACGTCCAGAACAAATTACTGTGTGCTCATCCTTTCCATTGCCGAAGTAT
AGAATCACTGGTGTGCAGAAGATCCAATGCTCCCAGCCTATATTGTTCTCACCGAAAGTGCCTGCGTATATTCATCC
AAGGAAGTATCTCGTGGAAACACCACCGGTAGACGAGACTCCGGAGCCATCGGCAGAGAACCAATCCACAGAGG
GGACACCTGAACAACCACCACTTATAACCGAGGATGAGACCAGGACTAGAACGCCTGAGCCGATCATCATCGAAG
AGGAAGAAGAGGATAGCATAAGTTTGCTGTCAGATGGCCCGACCCACCAGGTGCTGCAAGTCGAGGCAGACATT
CACGGGCCGCCCTCTGTATCTAGCTCATCCTGGTCCATTCCTCATGCATCCGACTTTGATGTGGACAGTTTATCCAT
ACTTGACACCCTGGAGGGAGCTAGCGTGACCAGCGGGGCAACGTCAGCCGAGACTAACTCTTACTTCGCAAAGAG
TATGGAGTTTCTGGCGCGACCGGTGCCTGCGCCTCGAACAGTATTCAGGAACCCTCCACATCCCGCTCCGCGCACA
AGAACACCGTCACTTGCACCCAGCAGGGCCTGCTCGAGAACCAGCCTAGTTTCCACCCCGCCAGGCGTGAATAGG
GTGATCACTAGAGAGGAGCTCGAGGCGCTTACCCCGTCACGCACTCCTAGCAGGTCGGTCTCGAGAACCAGCCTG
GTCTCCAACCCGCCAGGCGTAAATAGGGTGATTACAAGAGAGGAGTTTGAGGCGTTCGTAGCACAACAACAATGA
CGGTTTGATGCGGGTGCA
SEQ ID NO: 207, nsp4 coding sequence
TACATCTTTTCCTCCGACACCGGTCAAGGGCATTTACAACAAAAATCAGTAAGGCAAACGGTGCTATCCGAAGTGG
TGTTGGAGAGGACCGAATTGGAGATTTCGTATGCCCCGCGCCTCGACCAAGAAAAAGAAGAATTACTACGCAAGA
AATTACAGTTAAATCCCACACCTGCTAACAGAAGCAGATACCAGTCCAGGAAGGTGGAGAACATGAAAGCCATAA
CAGCTAGACGTATTCTGCAAGGCCTAGGGCATTATTTGAAGGCAGAAGGAAAAGTGGAGTGCTACCGAACCCTGC
ATCCTGTTCCTTTGTATTCATCTAGTGTGAACCGTGCCTTTTCAAGCCCCAAGGTCGCAGTGGAAGCCTGTAACGCC
ATGTTGAAAGAGAACTTTCCGACTGTGGCTTCTTACTGTATTATTCCAGAGTACGATGCCTATTTGGACATGGTTGA
CGGAGCTTCATGCTGCTTAGACACTGCCAGTTTTTGCCCTGCAAAGCTGCGCAGCTTTCCAAAGAAACACTCCTATT
TGGAACCCACAATACGATCGGCAGTGCCTTCAGCGATCCAGAACACGCTCCAGAACGTCCTGGCAGCTGCCACAA
AAAGAAATTGCAATGTCACGCAAATGAGAGAATTGCCCGTATTGGATTCGGCGGCCTTTAATGTGGAATGCTTCA
AGAAATATGCGTGTAATAATGAATATTGGGAAACGTTTAAAGAAAACCCCATCAGGCTTACTGAAGAAAACGTGG
TAAATTACATTACCAAATTAAAAGGACCAAAAGCTGCTGCTCTTTTTGCGAAGACACATAATTTGAATATGTTGCAG
GACATACCAATGGACAGGTTTGTAATGGACTTAAAGAGAGACGTGAAAGTGACTCCAGGAACAAAACATACTGAA
GAACGGCCCAAGGTACAGGTGATCCAGGCTGCCGATCCGCTAGCAACAGCGTATCTGTGCGGAATCCACCGAGA
GCTGGTTAGGAGATTAAATGCGGTCCTGCTTCCGAACATTCATACACTGTTTGATATGTCGGCTGAAGACTTTGAC
GCTATTATAGCCGAGCACTTCCAGCCTGGGGATTGTGTTCTGGAAACTGACATCGCGTCGTTTGATAAAAGTGAGG
ACGACGCCATGGCTCTGACCGCGTTAATGATTCTGGAAGACTTAGGTGTGGACGCAGAGCTGTTGACGCTGATTG
AGGCGGCTTTCGGCGAAATTTCATCAATACATTTGCCCACTAAAACTAAATTTAAATTCGGAGCCATGATGAAATCT
GGAATGTTCCTCACACTGTTTGTGAACACAGTCATTAACATTGTAATCGCAAGCAGAGTGTTGAGAGAACGGCTAA
CCGGATCACCATGTGCAGCATTCATTGGAGATGACAATATCGTGAAAGGAGTCAAATCGGACAAATTAATGGCAG
ACAGGTGCGCCACCTGGTTGAATATGGAAGTCAAGATTATAGATGCTGTGGTGGGCGAGAAAGCGCCTTATTTCT
GTGGAGGGTTTATTTTGTGTGACTCCGTGACCGGCACAGCGTGCCGTGTGGCAGACCCCCTAAAAAGGCTGTTTA
AGCTTGGCAAACCTCTGGCAGCAGACGATGAACATGATGATGACAGGAGAAGGGCATTGCATGAAGAGTCAACA
CGCTGGAACCGAGTGGGTATTCTTTCAGAGCTGTGCAAGGCAGTAGAATCAAGGTATGAAACCGTAGGAACTTCC
ATCATAGTTATGGCCATGACTACTCTAGCTAGCAGTGTTAAATCATTCAGCTACCTGAGAGGGGCCCCTATAACTCT
CTACGGC
SEQ ID NO: 208, 3′-UTR
ATACAGCAGCAATTGGCAAGCTGCTTACATAGAACTCGCGGCGATTGGCATGCCGCTTTAAAATTTTTATTTTATTT
TTCTTTTCTTTTCCGAATCGGATTTTGTTTTTAATATTTC
SEQ ID NO: 209, polyA site
AAAAAAAAAAAAAAAAAAAAAAAAAAAAAAAAAAAAAAAA

The application's sequence listing, which the Patent Office published only in electronic form, follows.

SEQUENCE LISTING (209 sequences)

SEQ ID NO: 1 - protein, 1273 aa, Artificial Sequence
  S protein
MFVFLVLLPLVSSQCVNLTTRTQLPPAYTNSFTRGVYYPDKVFRSSVLHSTQDLFLPFFSNVTWFHAIHVSGTNGTKRFDNPVLPFNDGVYFASTEKSNIIRGWIFGTTLDSKTQSLLIVNNATNVVIKVCEFQFCNDPFLGVYYHKNNKSWMESEFRVYSSANNCTFEYVSQPFLMDLEGKQGNFKNLREFVFKNIDGYFKIYSKHTPINLVRDLPQGFSALEPLVDLPIGINITRFQTLLALHRSYLTPGDSSSGWTAGAAAYYVGYLQPRTFLLKYNENGTITDAVDCALDPLSETKCTLKSFTVEKGIYQTSNFRVQPTESIVRFPNITNLCPFGEVFNATRFASVYAWNRKRISNCVADYSVLYNSASFSTFKCYGVSPTKLNDLCFTNVYADSFVIRGDEVRQIAPGQTGKIADYNYKLPDDFTGCVIAWNSNNLDSKVGGNYNYLYRLFRKSNLKPFERDISTEIYQAGSTPCNGVEGFNCYFPLQSYGFQPTNGVGYQPYRVVVLSFELLHAPATVCGPKKSTNLVKNKCVNFNFNGLTGTGVLTESNKKFLPFQQFGRDIADTTDAVRDPQTLEILDITPCSFGGVSVITPGTNTSNQVAVLYQDVNCTEVPVAIHADQLTPTWRVYSTGSNVFQTRAGCLIGAEHVNNSYECDIPIGAGICASYQTQTNSPRRARSVASQSIIAYTMSLGAENSVAYSNNSIAIPTNFTISVTTEILPVSMTKTSVDCTMYICGDSTECSNLLLQYGSFCTQLNRALTGIAVEQDKNTQEVFAQVKQIYKTPPIKDFGGFNFSQILPDPSKPSKRSFIEDLLFNKVTLADAGFIKQYGDCLGDIAARDLICAQKFNGLTVLPPLLTDEMIAQYTSALLAGTITSGWTFGAGAALQIPFAMQMAYRFNGIGVTQNVLYENQKLIANQFNSAIGKIQDSLSSTASALGKLQDVVNQNAQALNTLVKQLSSNFGAISSVLNDILSRLDKVEAEVQIDRLITGRLQSLQTYVTQQLIRAAEIRASANLAATKMSECVLGQSKRVDFCGKGYHLMSFPQSAPHGVVFLHVTYVPAQEKNFTTAPAICHDGKAHFPREGVFVSNGTHWFVTQRNFYEPQIITTDNTFVSGNCDVVIGIVNNTVYDPLQPELDSFKEELDKYFKNHTSPDVDLGDISGINASVVNIQKEIDRLNEVAKNLNESLIDLQELGKYEQYIKWPWYIWLGFIAGLIAIVMVTIMLCCMTSCCSCLKGCCSCGSCCKFDEDDSEPVLKGVKLHYT

SEQ ID NO: 2 - protein, 1297 aa, Artificial Sequence
  S protein with furin knockout
MFVFLVLLPLVSSQCVNLTTRTQLPPAYTNSFTRGVYYPDKVFRSSVLHSTQDLFLPFFSNVTWFHAIHVSGTNGTKRFDNPVLPFNDGVYFASTEKSNIIRGWIFGTTLDSKTQSLLIVNNATNVVIKVCEFQFCNDPFLGVYYHKNNKSWMESEFRVYSSANNCTFEYVSQPFLMDLEGKQGNFKNLREFVFKNIDGYFKIYSKHTPINLVRDLPQGFSALEPLVDLPIGINITRFQTLLALHRSYLTPGDSSSGWTAGAAAYYVGYLQPRTFLLKYNENGTITDAVDCALDPLSETKCTLKSFTVEKGIYQTSNFRVQPTESIVRFPNITNLCPFGEVFNATRFASVYAWNRKRISNCVADYSVLYNSASFSTFKCYGVSPTKLNDLCFTNVYADSFVIRGDEVRQIAPGQTGKIADYNYKLPDDFTGCVIAWNSNNLDSKVGGNYNYLYRLFRKSNLKPFERDISTEIYQAGSTPCNGVEGFNCYFPLQSYGFQPTNGVGYQPYRVVVLSFELLHAPATVCGPKKSTNLVKNKCVNFNFNGLTGTGVLTESNKKFLPFQQFGRDIADTTDAVRDPQTLEILDITPCSFGGVSVITPGTNTSNQVAVLYQDVNCTEVPVAIHADQLTPTWRVYSTGSNVFQTRAGCLIGAEHVNNSYECDIPIGAGICASYQTQTNSPSRAGSVASQSIIAYTMSLGAENSVAYSNNSIAIPTNFTISVTTEILPVSMTKTSVDCTMYICGDSTECSNLLLQYGSFCTQLNRALTGIAVEQDKNTQEVFAQVKQIYKTPPIKDFGGFNFSQILPDPSKPSKRSFIEDLLFNKVTLADAGFIKQYGDCLGDIAARDLICAQKFNGLTVLPPLLTDEMIAQYTSALLAGTITSGWTFGAGAALQIPFAMQMAYRFNGIGVTQNVLYENQKLIANQFNSAIGKIQDSLSSTASALGKLQDVVNQNAQALNTLVKQLSSNFGAISSVLNDILSRLDKVEAEVQIDRLITGRLQSLQTYVTQQLIRAAEIRASANLAATKMSECVLGQSKRVDFCGKGYHLMSFPQSAPHGVVFLHVTYVPAQEKNFTTAPAICHDGKAHFPREGVFVSNGTHWFVTQRNFYEPQIITTDNTFVSGNCDVVIGIVNNTVYDPLQPELDSFKEELDKYFKNHTSPDVDLGDISGINASVVNIQKEIDRLNEVAKNLNESLIDLQELGKYEQGSGYIPEAPRDGQAYVRKDGEWVLLSTFLGRSLEVLFQGPGSLPETGGGSDYKDDDDKGGGGSGGGGSGGGGSGGGGSGGGGSHHHHHH

SEQ ID NO: 3 - protein, 1297 aa, Artificial Sequence
  S protein with furin knockout and double proline in the hinge loop
MFVFLVLLPLVSSQCVNLTTRTQLPPAYTNSFTRGVYYPDKVFRSSVLHSTQDLFLPFFSNVTWFHAIHVSGTNGTKRFDNPVLPFNDGVYFASTEKSNIIRGWIFGTTLDSKTQSLLIVNNATNVVIKVCEFQFCNDPFLGVYYHKNNKSWMESEFRVYSSANNCTFEYVSQPFLMDLEGKQGNFKNLREFVFKNIDGYFKIYSKHTPINLVRDLPQGFSALEPLVDLPIGINITRFQTLLALHRSYLTPGDSSSGWTAGAAAYYVGYLQPRTFLLKYNENGTITDAVDCALDPLSETKCTLKSFTVEKGIYQTSNFRVQPTESIVRFPNITNLCPFGEVFNATRFASVYAWNRKRISNCVADYSVLYNSASFSTFKCYGVSPTKLNDLCFTNVYADSFVIRGDEVRQIAPGQTGKIADYNYKLPDDFTGCVIAWNSNNLDSKVGGNYNYLYRLFRKSNLKPFERDISTEIYQAGSTPCNGVEGFNCYFPLQSYGFQPTNGVGYQPYRVVVLSFELLHAPATVCGPKKSTNLVKNKCVNFNFNGLTGTGVLTESNKKFLPFQQFGRDIADTTDAVRDPQTLEILDITPCSFGGVSVITPGTNTSNQVAVLYQDVNCTEVPVAIHADQLTPTWRVYSTGSNVFQTRAGCLIGAEHVNNSYECDIPIGAGICASYQTQTNSPSRAGSVASQSIIAYTMSLGAENSVAYSNNSIAIPTNFTISVTTEILPVSMTKTSVDCTMYICGDSTECSNLLLQYGSFCTQLNRALTGIAVEQDKNTQEVFAQVKQIYKTPPIKDFGGFNFSQILPDPSKPSKRSFIEDLLFNKVTLADAGFIKQYGDCLGDIAARDLICAQKFNGLTVLPPLLTDEMIAQYTSALLAGTITSGWTFGAGAALQIPFAMQMAYRFNGIGVTQNVLYENQKLIANQFNSAIGKIQDSLSSTASALGKLQDVVNQNAQALNTLVKQLSSNFGAISSVLNDILSRLDPPEAEVQIDRLITGRLQSLQTYVTQQLIRAAEIRASANLAATKMSECVLGQSKRVDFCGKGYHLMSFPQSAPHGVVFLHVTYVPAQEKNFTTAPAICHDGKAHFPREGVFVSNGTHWFVTQRNFYEPQIITTDNTFVSGNCDVVIGIVNNTVYDPLQPELDSFKEELDKYFKNHTSPDVDLGDISGINASVVNIQKEIDRLNEVAKNLNESLIDLQELGKYEQGSGYIPEAPRDGQAYVRKDGEWVLLSTFLGRSLEVLFQGPGSLPETGGGSDYKDDDDKGGGGSGGGGSGGGGSGGGGSGGGGSHHHHHH

SEQ ID NO: 4 - protein, 27 aa, Artificial Sequence
  foldon
GYIPEAPRDGQAYVRKDGEWVLLSTFL

SEQ ID NO: 5 - protein, 1297 aa, Artificial Sequence
  SEQ ID NO:2 + A942P
MFVFLVLLPLVSSQCVNLTTRTQLPPAYTNSFTRGVYYPDKVFRSSVLHSTQDLFLPFFSNVTWFHAIHVSGTNGTKRFDNPVLPFNDGVYFASTEKSNIIRGWIFGTTLDSKTQSLLIVNNATNVVIKVCEFQFCNDPFLGVYYHKNNKSWMESEFRVYSSANNCTFEYVSQPFLMDLEGKQGNFKNLREFVFKNIDGYFKIYSKHTPINLVRDLPQGFSALEPLVDLPIGINITRFQTLLALHRSYLTPGDSSSGWTAGAAAYYVGYLQPRTFLLKYNENGTITDAVDCALDPLSETKCTLKSFTVEKGIYQTSNFRVQPTESIVRFPNITNLCPFGEVFNATRFASVYAWNRKRISNCVADYSVLYNSASFSTFKCYGVSPTKLNDLCFTNVYADSFVIRGDEVRQIAPGQTGKIADYNYKLPDDFTGCVIAWNSNNLDSKVGGNYNYLYRLFRKSNLKPFERDISTEIYQAGSTPCNGVEGFNCYFPLQSYGFQPTNGVGYQPYRVVVLSFELLHAPATVCGPKKSTNLVKNKCVNFNFNGLTGTGVLTESNKKFLPFQQFGRDIADTTDAVRDPQTLEILDITPCSFGGVSVITPGTNTSNQVAVLYQDVNCTEVPVAIHADQLTPTWRVYSTGSNVFQTRAGCLIGAEHVNNSYECDIPIGAGICASYQTQTNSPSRAGSVASQSIIAYTMSLGAENSVAYSNNSIAIPTNFTISVTTEILPVSMTKTSVDCTMYICGDSTECSNLLLQYGSFCTQLNRALTGIAVEQDKNTQEVFAQVKQIYKTPPIKDFGGFNFSQILPDPSKPSKRSFIEDLLFNKVTLADAGFIKQYGDCLGDIAARDLICAQKFNGLTVLPPLLTDEMIAQYTSALLAGTITSGWTFGAGAALQIPFAMQMAYRFNGIGVTQNVLYENQKLIANQFNSAIGKIQDSLSSTPSALGKLQDVVNQNAQALNTLVKQLSSNFGAISSVLNDILSRLDKVEAEVQIDRLITGRLQSLQTYVTQQLIRAAEIRASANLAATKMSECVLGQSKRVDFCGKGYHLMSFPQSAPHGVVFLHVTYVPAQEKNFTTAPAICHDGKAHFPREGVFVSNGTHWFVTQRNFYEPQIITTDNTFVSGNCDVVIGIVNNTVYDPLQPELDSFKEELDKYFKNHTSPDVDLGDISGINASVVNIQKEIDRLNEVAKNLNESLIDLQELGKYEQGSGYIPEAPRDGQAYVRKDGEWVLLSTFLGRSLEVLFQGPGSLPETGGGSDYKDDDDKGGGGSGGGGSGGGGSGGGGSGGGGSHHHHHH

SEQ ID NO: 6 - protein, 1297 aa, Artificial Sequence
  SEQ ID NO:2 + A892P
MFVFLVLLPLVSSQCVNLTTRTQLPPAYTNSFTRGVYYPDKVFRSSVLHSTQDLFLPFFSNVTWFHAIHVSGTNGTKRFDNPVLPFNDGVYFASTEKSNIIRGWIFGTTLDSKTQSLLIVNNATNVVIKVCEFQFCNDPFLGVYYHKNNKSWMESEFRVYSSANNCTFEYVSQPFLMDLEGKQGNFKNLREFVFKNIDGYFKIYSKHTPINLVRDLPQGFSALEPLVDLPIGINITRFQTLLALHRSYLTPGDSSSGWTAGAAAYYVGYLQPRTFLLKYNENGTITDAVDCALDPLSETKCTLKSFTVEKGIYQTSNFRVQPTESIVRFPNITNLCPFGEVFNATRFASVYAWNRKRISNCVADYSVLYNSASFSTFKCYGVSPTKLNDLCFTNVYADSFVIRGDEVRQIAPGQTGKIADYNYKLPDDFTGCVIAWNSNNLDSKVGGNYNYLYRLFRKSNLKPFERDISTEIYQAGSTPCNGVEGFNCYFPLQSYGFQPTNGVGYQPYRVVVLSFELLHAPATVCGPKKSTNLVKNKCVNFNFNGLTGTGVLTESNKKFLPFQQFGRDIADTTDAVRDPQTLEILDITPCSFGGVSVITPGTNTSNQVAVLYQDVNCTEVPVAIHADQLTPTWRVYSTGSNVFQTRAGCLIGAEHVNNSYECDIPIGAGICASYQTQTNSPSRAGSVASQSIIAYTMSLGAENSVAYSNNSIAIPTNFTISVTTEILPVSMTKTSVDCTMYICGDSTECSNLLLQYGSFCTQLNRALTGIAVEQDKNTQEVFAQVKQIYKTPPIKDFGGFNFSQILPDPSKPSKRSFIEDLLFNKVTLADAGFIKQYGDCLGDIAARDLICAQKFNGLTVLPPLLTDEMIAQYTSALLAGTITSGWTFGAGPALQIPFAMQMAYRFNGIGVTQNVLYENQKLIANQFNSAIGKIQDSLSSTASALGKLQDVVNQNAQALNTLVKQLSSNFGAISSVLNDILSRLDKVEAEVQIDRLITGRLQSLQTYVTQQLIRAAEIRASANLAATKMSECVLGQSKRVDFCGKGYHLMSFPQSAPHGVVFLHVTYVPAQEKNFTTAPAICHDGKAHFPREGVFVSNGTHWFVTQRNFYEPQIITTDNTFVSGNCDVVIGIVNNTVYDPLQPELDSFKEELDKYFKNHTSPDVDLGDISGINASVVNIQKEIDRLNEVAKNLNESLIDLQELGKYEQGSGYIPEAPRDGQAYVRKDGEWVLLSTFLGRSLEVLFQGPGSLPETGGGSDYKDDDDKGGGGSGGGGSGGGGSGGGGSGGGGSHHHHHH

SEQ ID NO: 7 - protein, 1297 aa, Artificial Sequence
  SEQ ID NO:2 + D614N
MFVFLVLLPLVSSQCVNLTTRTQLPPAYTNSFTRGVYYPDKVFRSSVLHSTQDLFLPFFSNVTWFHAIHVSGTNGTKRFDNPVLPFNDGVYFASTEKSNIIRGWIFGTTLDSKTQSLLIVNNATNVVIKVCEFQFCNDPFLGVYYHKNNKSWMESEFRVYSSANNCTFEYVSQPFLMDLEGKQGNFKNLREFVFKNIDGYFKIYSKHTPINLVRDLPQGFSALEPLVDLPIGINITRFQTLLALHRSYLTPGDSSSGWTAGAAAYYVGYLQPRTFLLKYNENGTITDAVDCALDPLSETKCTLKSFTVEKGIYQTSNFRVQPTESIVRFPNITNLCPFGEVFNATRFASVYAWNRKRISNCVADYSVLYNSASFSTFKCYGVSPTKLNDLCFTNVYADSFVIRGDEVRQIAPGQTGKIADYNYKLPDDFTGCVIAWNSNNLDSKVGGNYNYLYRLFRKSNLKPFERDISTEIYQAGSTPCNGVEGFNCYFPLQSYGFQPTNGVGYQPYRVVVLSFELLHAPATVCGPKKSTNLVKNKCVNFNFNGLTGTGVLTESNKKFLPFQQFGRDIADTTDAVRDPQTLEILDITPCSFGGVSVITPGTNTSNQVAVLYQNVNCTEVPVAIHADQLTPTWRVYSTGSNVFQTRAGCLIGAEHVNNSYECDIPIGAGICASYQTQTNSPSRAGSVASQSIIAYTMSLGAENSVAYSNNSIAIPTNFTISVTTEILPVSMTKTSVDCTMYICGDSTECSNLLLQYGSFCTQLNRALTGIAVEQDKNTQEVFAQVKQIYKTPPIKDFGGFNFSQILPDPSKPSKRSFIEDLLFNKVTLADAGFIKQYGDCLGDIAARDLICAQKFNGLTVLPPLLTDEMIAQYTSALLAGTITSGWTFGAGAALQIPFAMQMAYRFNGIGVTQNVLYENQKLIANQFNSAIGKIQDSLSSTASALGKLQDVVNQNAQALNTLVKQLSSNFGAISSVLNDILSRLDKVEAEVQIDRLITGRLQSLQTYVTQQLIRAAEIRASANLAATKMSECVLGQSKRVDFCGKGYHLMSFPQSAPHGVVFLHVTYVPAQEKNFTTAPAICHDGKAHFPREGVFVSNGTHWFVTQRNFYEPQIITTDNTFVSGNCDVVIGIVNNTVYDPLQPELDSFKEELDKYFKNHTSPDVDLGDISGINASVVNIQKEIDRLNEVAKNLNESLIDLQELGKYEQGSGYIPEAPRDGQAYVRKDGEWVLLSTFLGRSLEVLFQGPGSLPETGGGSDYKDDDDKGGGGSGGGGSGGGGSGGGGSGGGGSHHHHHH

SEQ ID NO: 8 - protein, 1297 aa, Artificial Sequence
  SEQ ID NO:2 + T572I
MFVFLVLLPLVSSQCVNLTTRTQLPPAYTNSFTRGVYYPDKVFRSSVLHSTQDLFLPFFSNVTWFHAIHVSGTNGTKRFDNPVLPFNDGVYFASTEKSNIIRGWIFGTTLDSKTQSLLIVNNATNVVIKVCEFQFCNDPFLGVYYHKNNKSWMESEFRVYSSANNCTFEYVSQPFLMDLEGKQGNFKNLREFVFKNIDGYFKIYSKHTPINLVRDLPQGFSALEPLVDLPIGINITRFQTLLALHRSYLTPGDSSSGWTAGAAAYYVGYLQPRTFLLKYNENGTITDAVDCALDPLSETKCTLKSFTVEKGIYQTSNFRVQPTESIVRFPNITNLCPFGEVFNATRFASVYAWNRKRISNCVADYSVLYNSASFSTFKCYGVSPTKLNDLCFTNVYADSFVIRGDEVRQIAPGQTGKIADYNYKLPDDFTGCVIAWNSNNLDSKVGGNYNYLYRLFRKSNLKPFERDISTEIYQAGSTPCNGVEGFNCYFPLQSYGFQPTNGVGYQPYRVVVLSFELLHAPATVCGPKKSTNLVKNKCVNFNFNGLTGTGVLTESNKKFLPFQQFGRDIADITDAVRDPQTLEILDITPCSFGGVSVITPGTNTSNQVAVLYQDVNCTEVPVAIHADQLTPTWRVYSTGSNVFQTRAGCLIGAEHVNNSYECDIPIGAGICASYQTQTNSPSRAGSVASQSIIAYTMSLGAENSVAYSNNSIAIPTNFTISVTTEILPVSMTKTSVDCTMYICGDSTECSNLLLQYGSFCTQLNRALTGIAVEQDKNTQEVFAQVKQIYKTPPIKDFGGFNFSQILPDPSKPSKRSFIEDLLFNKVTLADAGFIKQYGDCLGDIAARDLICAQKFNGLTVLPPLLTDEMIAQYTSALLAGTITSGWTFGAGAALQIPFAMQMAYRFNGIGVTQNVLYENQKLIANQFNSAIGKIQDSLSSTASALGKLQDVVNQNAQALNTLVKQLSSNFGAISSVLNDILSRLDKVEAEVQIDRLITGRLQSLQTYVTQQLIRAAEIRASANLAATKMSECVLGQSKRVDFCGKGYHLMSFPQSAPHGVVFLHVTYVPAQEKNFTTAPAICHDGKAHFPREGVFVSNGTHWFVTQRNFYEPQIITTDNTFVSGNCDVVIGIVNNTVYDPLQPELDSFKEELDKYFKNHTSPDVDLGDISGINASVVNIQKEIDRLNEVAKNLNESLIDLQELGKYEQGSGYIPEAPRDGQAYVRKDGEWVLLSTFLGRSLEVLFQGPGSLPETGGGSDYKDDDDKGGGGSGGGGSGGGGSGGGGSGGGGSHHHHHH

SEQ ID NO: 9 - protein, 1297 aa, Artificial Sequence
  SEQ ID NO:2 + N532P
MFVFLVLLPLVSSQCVNLTTRTQLPPAYTNSFTRGVYYPDKVFRSSVLHSTQDLFLPFFSNVTWFHAIHVSGTNGTKRFDNPVLPFNDGVYFASTEKSNIIRGWIFGTTLDSKTQSLLIVNNATNVVIKVCEFQFCNDPFLGVYYHKNNKSWMESEFRVYSSANNCTFEYVSQPFLMDLEGKQGNFKNLREFVFKNIDGYFKIYSKHTPINLVRDLPQGFSALEPLVDLPIGINITRFQTLLALHRSYLTPGDSSSGWTAGAAAYYVGYLQPRTFLLKYNENGTITDAVDCALDPLSETKCTLKSFTVEKGIYQTSNFRVQPTESIVRFPNITNLCPFGEVFNATRFASVYAWNRKRISNCVADYSVLYNSASFSTFKCYGVSPTKLNDLCFTNVYADSFVIRGDEVRQIAPGQTGKIADYNYKLPDDFTGCVIAWNSNNLDSKVGGNYNYLYRLFRKSNLKPFERDISTEIYQAGSTPCNGVEGFNCYFPLQSYGFQPTNGVGYQPYRVVVLSFELLHAPATVCGPKKSTPLVKNKCVNFNFNGLTGTGVLTESNKKFLPFQQFGRDIADTTDAVRDPQTLEILDITPCSFGGVSVITPGTNTSNQVAVLYQDVNCTEVPVAIHADQLTPTWRVYSTGSNVFQTRAGCLIGAEHVNNSYECDIPIGAGICASYQTQTNSPSRAGSVASQSIIAYTMSLGAENSVAYSNNSIAIPTNFTISVTTEILPVSMTKTSVDCTMYICGDSTECSNLLLQYGSFCTQLNRALTGIAVEQDKNTQEVFAQVKQIYKTPPIKDFGGFNFSQILPDPSKPSKRSFIEDLLFNKVTLADAGFIKQYGDCLGDIAARDLICAQKFNGLTVLPPLLTDEMIAQYTSALLAGTITSGWTFGAGAALQIPFAMQMAYRFNGIGVTQNVLYENQKLIANQFNSAIGKIQDSLSSTASALGKLQDVVNQNAQALNTLVKQLSSNFGAISSVLNDILSRLDKVEAEVQIDRLITGRLQSLQTYVTQQLIRAAEIRASANLAATKMSECVLGQSKRVDFCGKGYHLMSFPQSAPHGVVFLHVTYVPAQEKNFTTAPAICHDGKAHFPREGVFVSNGTHWFVTQRNFYEPQIITTDNTFVSGNCDVVIGIVNNTVYDPLQPELDSFKEELDKYFKNHTSPDVDLGDISGINASVVNIQKEIDRLNEVAKNLNESLIDLQELGKYEQGSGYIPEAPRDGQAYVRKDGEWVLLSTFLGRSLEVLFQGPGSLPETGGGSDYKDDDDKGGGGSGGGGSGGGGSGGGGSGGGGSHHHHHH

SEQ ID NO: 10 - protein, 1297 aa, Artificial Sequence
  SEQ ID NO:2 + G880C + F888C
MFVFLVLLPLVSSQCVNLTTRTQLPPAYTNSFTRGVYYPDKVFRSSVLHSTQDLFLPFFSNVTWFHAIHVSGTNGTKRFDNPVLPFNDGVYFASTEKSNIIRGWIFGTTLDSKTQSLLIVNNATNVVIKVCEFQFCNDPFLGVYYHKNNKSWMESEFRVYSSANNCTFEYVSQPFLMDLEGKQGNFKNLREFVFKNIDGYFKIYSKHTPINLVRDLPQGFSALEPLVDLPIGINITRFQTLLALHRSYLTPGDSSSGWTAGAAAYYVGYLQPRTFLLKYNENGTITDAVDCALDPLSETKCTLKSFTVEKGIYQTSNFRVQPTESIVRFPNITNLCPFGEVFNATRFASVYAWNRKRISNCVADYSVLYNSASFSTFKCYGVSPTKLNDLCFTNVYADSFVIRGDEVRQIAPGQTGKIADYNYKLPDDFTGCVIAWNSNNLDSKVGGNYNYLYRLFRKSNLKPFERDISTEIYQAGSTPCNGVEGFNCYFPLQSYGFQPTNGVGYQPYRVVVLSFELLHAPATVCGPKKSTNLVKNKCVNFNFNGLTGTGVLTESNKKFLPFQQFGRDIADTTDAVRDPQTLEILDITPCSFGGVSVITPGTNTSNQVAVLYQDVNCTEVPVAIHADQLTPTWRVYSTGSNVFQTRAGCLIGAEHVNNSYECDIPIGAGICASYQTQTNSPSRAGSVASQSIIAYTMSLGAENSVAYSNNSIAIPTNFTISVTTEILPVSMTKTSVDCTMYICGDSTECSNLLLQYGSFCTQLNRALTGIAVEQDKNTQEVFAQVKQIYKTPPIKDFGGFNFSQILPDPSKPSKRSFIEDLLFNKVTLADAGFIKQYGDCLGDIAARDLICAQKFNGLTVLPPLLTDEMIAQYTSALLACTITSGWTCGAGAALQIPFAMQMAYRFNGIGVTQNVLYENQKLIANQFNSAIGKIQDSLSSTASALGKLQDVVNQNAQALNTLVKQLSSNFGAISSVLNDILSRLDKVEAEVQIDRLITGRLQSLQTYVTQQLIRAAEIRASANLAATKMSECVLGQSKRVDFCGKGYHLMSFPQSAPHGVVFLHVTYVPAQEKNFTTAPAICHDGKAHFPREGVFVSNGTHWFVTQRNFYEPQIITTDNTFVSGNCDVVIGIVNNTVYDPLQPELDSFKEELDKYFKNHTSPDVDLGDISGINASVVNIQKEIDRLNEVAKNLNESLIDLQELGKYEQGSGYIPEAPRDGQAYVRKDGEWVLLSTFLGRSLEVLFQGPGSLPETGGGSDYKDDDDKGGGGSGGGGSGGGGSGGGGSGGGGSHHHHHH

SEQ ID NO: 11 - protein, 1297 aa, Artificial Sequence
  SEQ ID NO:2 + S884C + A893C
MFVFLVLLPLVSSQCVNLTTRTQLPPAYTNSFTRGVYYPDKVFRSSVLHSTQDLFLPFFSNVTWFHAIHVSGTNGTKRFDNPVLPFNDGVYFASTEKSNIIRGWIFGTTLDSKTQSLLIVNNATNVVIKVCEFQFCNDPFLGVYYHKNNKSWMESEFRVYSSANNCTFEYVSQPFLMDLEGKQGNFKNLREFVFKNIDGYFKIYSKHTPINLVRDLPQGFSALEPLVDLPIGINITRFQTLLALHRSYLTPGDSSSGWTAGAAAYYVGYLQPRTFLLKYNENGTITDAVDCALDPLSETKCTLKSFTVEKGIYQTSNFRVQPTESIVRFPNITNLCPFGEVFNATRFASVYAWNRKRISNCVADYSVLYNSASFSTFKCYGVSPTKLNDLCFTNVYADSFVIRGDEVRQIAPGQTGKIADYNYKLPDDFTGCVIAWNSNNLDSKVGGNYNYLYRLFRKSNLKPFERDISTEIYQAGSTPCNGVEGFNCYFPLQSYGFQPTNGVGYQPYRVVVLSFELLHAPATVCGPKKSTNLVKNKCVNFNFNGLTGTGVLTESNKKFLPFQQFGRDIADTTDAVRDPQTLEILDITPCSFGGVSVITPGTNTSNQVAVLYQDVNCTEVPVAIHADQLTPTWRVYSTGSNVFQTRAGCLIGAEHVNNSYECDIPIGAGICASYQTQTNSPSRAGSVASQSIIAYTMSLGAENSVAYSNNSIAIPTNFTISVTTEILPVSMTKTSVDCTMYICGDSTECSNLLLQYGSFCTQLNRALTGIAVEQDKNTQEVFAQVKQIYKTPPIKDFGGFNFSQILPDPSKPSKRSFIEDLLFNKVTLADAGFIKQYGDCLGDIAARDLICAQKFNGLTVLPPLLTDEMIAQYTSALLAGTITCGWTFGAGACLQIPFAMQMAYRFNGIGVTQNVLYENQKLIANQFNSAIGKIQDSLSSTASALGKLQDVVNQNAQALNTLVKQLSSNFGAISSVLNDILSRLDKVEAEVQIDRLITGRLQSLQTYVTQQLIRAAEIRASANLAATKMSECVLGQSKRVDFCGKGYHLMSFPQSAPHGVVFLHVTYVPAQEKNFTTAPAICHDGKAHFPREGVFVSNGTHWFVTQRNFYEPQIITTDNTFVSGNCDVVIGIVNNTVYDPLQPELDSFKEELDKYFKNHTSPDVDLGDISGINASVVNIQKEIDRLNEVAKNLNESLIDLQELGKYEQGSGYIPEAPRDGQAYVRKDGEWVLLSTFLGRSLEVLFQGPGSLPETGGGSDYKDDDDKGGGGSGGGGSGGGGSGGGGSGGGGSHHHHHH

SEQ ID NO: 12 - protein, 1297 aa, Artificial Sequence
  SEQ ID NO:3 + A942P
MFVFLVLLPLVSSQCVNLTTRTQLPPAYTNSFTRGVYYPDKVFRSSVLHSTQDLFLPFFSNVTWFHAIHVSGTNGTKRFDNPVLPFNDGVYFASTEKSNIIRGWIFGTTLDSKTQSLLIVNNATNVVIKVCEFQFCNDPFLGVYYHKNNKSWMESEFRVYSSANNCTFEYVSQPFLMDLEGKQGNFKNLREFVFKNIDGYFKIYSKHTPINLVRDLPQGFSALEPLVDLPIGINITRFQTLLALHRSYLTPGDSSSGWTAGAAAYYVGYLQPRTFLLKYNENGTITDAVDCALDPLSETKCTLKSFTVEKGIYQTSNFRVQPTESIVRFPNITNLCPFGEVFNATRFASVYAWNRKRISNCVADYSVLYNSASFSTFKCYGVSPTKLNDLCFTNVYADSFVIRGDEVRQIAPGQTGKIADYNYKLPDDFTGCVIAWNSNNLDSKVGGNYNYLYRLFRKSNLKPFERDISTEIYQAGSTPCNGVEGFNCYFPLQSYGFQPTNGVGYQPYRVVVLSFELLHAPATVCGPKKSTNLVKNKCVNFNFNGLTGTGVLTESNKKFLPFQQFGRDIADTTDAVRDPQTLEILDITPCSFGGVSVITPGTNTSNQVAVLYQDVNCTEVPVAIHADQLTPTWRVYSTGSNVFQTRAGCLIGAEHVNNSYECDIPIGAGICASYQTQTNSPSRAGSVASQSIIAYTMSLGAENSVAYSNNSIAIPTNFTISVTTEILPVSMTKTSVDCTMYICGDSTECSNLLLQYGSFCTQLNRALTGIAVEQDKNTQEVFAQVKQIYKTPPIKDFGGFNFSQILPDPSKPSKRSFIEDLLFNKVTLADAGFIKQYGDCLGDIAARDLICAQKFNGLTVLPPLLTDEMIAQYTSALLAGTITSGWTFGAGAALQIPFAMQMAYRFNGIGVTQNVLYENQKLIANQFNSAIGKIQDSLSSTPSALGKLQDVVNQNAQALNTLVKQLSSNFGAISSVLNDILSRLDPPEAEVQIDRLITGRLQSLQTYVTQQLIRAAEIRASANLAATKMSECVLGQSKRVDFCGKGYHLMSFPQSAPHGVVFLHVTYVPAQEKNFTTAPAICHDGKAHFPREGVFVSNGTHWFVTQRNFYEPQIITTDNTFVSGNCDVVIGIVNNTVYDPLQPELDSFKEELDKYFKNHTSPDVDLGDISGINASVVNIQKEIDRLNEVAKNLNESLIDLQELGKYEQGSGYIPEAPRDGQAYVRKDGEWVLLSTFLGRSLEVLFQGPGSLPETGGGSDYKDDDDKGGGGSGGGGSGGGGSGGGGSGGGGSHHHHHH

SEQ ID NO: 13 - protein, 1297 aa, Artificial Sequence
  SEQ ID NO:3 + A892P
MFVFLVLLPLVSSQCVNLTTRTQLPPAYTNSFTRGVYYPDKVFRSSVLHSTQDLFLPFFSNVTWFHAIHVSGTNGTKRFDNPVLPFNDGVYFASTEKSNIIRGWIFGTTLDSKTQSLLIVNNATNVVIKVCEFQFCNDPFLGVYYHKNNKSWMESEFRVYSSANNCTFEYVSQPFLMDLEGKQGNFKNLREFVFKNIDGYFKIYSKHTPINLVRDLPQGFSALEPLVDLPIGINITRFQTLLALHRSYLTPGDSSSGWTAGAAAYYVGYLQPRTFLLKYNENGTITDAVDCALDPLSETKCTLKSFTVEKGIYQTSNFRVQPTESIVRFPNITNLCPFGEVFNATRFASVYAWNRKRISNCVADYSVLYNSASFSTFKCYGVSPTKLNDLCFTNVYADSFVIRGDEVRQIAPGQTGKIADYNYKLPDDFTGCVIAWNSNNLDSKVGGNYNYLYRLFRKSNLKPFERDISTEIYQAGSTPCNGVEGFNCYFPLQSYGFQPTNGVGYQPYRVVVLSFELLHAPATVCGPKKSTNLVKNKCVNFNFNGLTGTGVLTESNKKFLPFQQFGRDIADTTDAVRDPQTLEILDITPCSFGGVSVITPGTNTSNQVAVLYQDVNCTEVPVAIHADQLTPTWRVYSTGSNVFQTRAGCLIGAEHVNNSYECDIPIGAGICASYQTQTNSPSRAGSVASQSIIAYTMSLGAENSVAYSNNSIAIPTNFTISVTTEILPVSMTKTSVDCTMYICGDSTECSNLLLQYGSFCTQLNRALTGIAVEQDKNTQEVFAQVKQIYKTPPIKDFGGFNFSQILPDPSKPSKRSFIEDLLFNKVTLADAGFIKQYGDCLGDIAARDLICAQKFNGLTVLPPLLTDEMIAQYTSALLAGTITSGWTFGAGPALQIPFAMQMAYRFNGIGVTQNVLYENQKLIANQFNSAIGKIQDSLSSTASALGKLQDVVNQNAQALNTLVKQLSSNFGAISSVLNDILSRLDPPEAEVQIDRLITGRLQSLQTYVTQQLIRAAEIRASANLAATKMSECVLGQSKRVDFCGKGYHLMSFPQSAPHGVVFLHVTYVPAQEKNFTTAPAICHDGKAHFPREGVFVSNGTHWFVTQRNFYEPQIITTDNTFVSGNCDVVIGIVNNTVYDPLQPELDSFKEELDKYFKNHTSPDVDLGDISGINASVVNIQKEIDRLNEVAKNLNESLIDLQELGKYEQGSGYIPEAPRDGQAYVRKDGEWVLLSTFLGRSLEVLFQGPGSLPETGGGSDYKDDDDKGGGGSGGGGSGGGGSGGGGSGGGGSHHHHHH

SEQ ID NO: 14 - protein, 1297 aa, Artificial Sequence
  SEQ ID NO:3 + D614N
MFVFLVLLPLVSSQCVNLTTRTQLPPAYTNSFTRGVYYPDKVFRSSVLHSTQDLFLPFFSNVTWFHAIHVSGTNGTKRFDNPVLPFNDGVYFASTEKSNIIRGWIFGTTLDSKTQSLLIVNNATNVVIKVCEFQFCNDPFLGVYYHKNNKSWMESEFRVYSSANNCTFEYVSQPFLMDLEGKQGNFKNLREFVFKNIDGYFKIYSKHTPINLVRDLPQGFSALEPLVDLPIGINITRFQTLLALHRSYLTPGDSSSGWTAGAAAYYVGYLQPRTFLLKYNENGTITDAVDCALDPLSETKCTLKSFTVEKGIYQTSNFRVQPTESIVRFPNITNLCPFGEVFNATRFASVYAWNRKRISNCVADYSVLYNSASFSTFKCYGVSPTKLNDLCFTNVYADSFVIRGDEVRQIAPGQTGKIADYNYKLPDDFTGCVIAWNSNNLDSKVGGNYNYLYRLFRKSNLKPFERDISTEIYQAGSTPCNGVEGFNCYFPLQSYGFQPTNGVGYQPYRVVVLSFELLHAPATVCGPKKSTNLVKNKCVNFNFNGLTGTGVLTESNKKFLPFQQFGRDIADTTDAVRDPQTLEILDITPCSFGGVSVITPGTNTSNQVAVLYQNVNCTEVPVAIHADQLTPTWRVYSTGSNVFQTRAGCLIGAEHVNNSYECDIPIGAGICASYQTQTNSPSRAGSVASQSIIAYTMSLGAENSVAYSNNSIAIPTNFTISVTTEILPVSMTKTSVDCTMYICGDSTECSNLLLQYGSFCTQLNRALTGIAVEQDKNTQEVFAQVKQIYKTPPIKDFGGFNFSQILPDPSKPSKRSFIEDLLFNKVTLADAGFIKQYGDCLGDIAARDLICAQKFNGLTVLPPLLTDEMIAQYTSALLAGTITSGWTFGAGAALQIPFAMQMAYRFNGIGVTQNVLYENQKLIANQFNSAIGKIQDSLSSTASALGKLQDVVNQNAQALNTLVKQLSSNFGAISSVLNDILSRLDPPEAEVQIDRLITGRLQSLQTYVTQQLIRAAEIRASANLAATKMSECVLGQSKRVDFCGKGYHLMSFPQSAPHGVVFLHVTYVPAQEKNFTTAPAICHDGKAHFPREGVFVSNGTHWFVTQRNFYEPQIITTDNTFVSGNCDVVIGIVNNTVYDPLQPELDSFKEELDKYFKNHTSPDVDLGDISGINASVVNIQKEIDRLNEVAKNLNESLIDLQELGKYEQGSGYIPEAPRDGQAYVRKDGEWVLLSTFLGRSLEVLFQGPGSLPETGGGSDYKDDDDKGGGGSGGGGSGGGGSGGGGSGGGGSHHHHHH

SEQ ID NO: 15 - protein, 1297 aa, Artificial Sequence
  SEQ ID NO:3 + T572I
MFVFLVLLPLVSSQCVNLTTRTQLPPAYTNSFTRGVYYPDKVFRSSVLHSTQDLFLPFFSNVTWFHAIHVSGTNGTKRFDNPVLPFNDGVYFASTEKSNIIRGWIFGTTLDSKTQSLLIVNNATNVVIKVCEFQFCNDPFLGVYYHKNNKSWMESEFRVYSSANNCTFEYVSQPFLMDLEGKQGNFKNLREFVFKNIDGYFKIYSKHTPINLVRDLPQGFSALEPLVDLPIGINITRFQTLLALHRSYLTPGDSSSGWTAGAAAYYVGYLQPRTFLLKYNENGTITDAVDCALDPLSETKCTLKSFTVEKGIYQTSNFRVQPTESIVRFPNITNLCPFGEVFNATRFASVYAWNRKRISNCVADYSVLYNSASFSTFKCYGVSPTKLNDLCFTNVYADSFVIRGDEVRQIAPGQTGKIADYNYKLPDDFTGCVIAWNSNNLDSKVGGNYNYLYRLFRKSNLKPFERDISTEIYQAGSTPCNGVEGFNCYFPLQSYGFQPTNGVGYQPYRVVVLSFELLHAPATVCGPKKSTNLVKNKCVNFNFNGLTGTGVLTESNKKFLPFQQFGRDIADITDAVRDPQTLEILDITPCSFGGVSVITPGTNTSNQVAVLYQDVNCTEVPVAIHADQLTPTWRVYSTGSNVFQTRAGCLIGAEHVNNSYECDIPIGAGICASYQTQTNSPSRAGSVASQSIIAYTMSLGAENSVAYSNNSIAIPTNFTISVTTEILPVSMTKTSVDCTMYICGDSTECSNLLLQYGSFCTQLNRALTGIAVEQDKNTQEVFAQVKQIYKTPPIKDFGGFNFSQILPDPSKPSKRSFIEDLLFNKVTLADAGFIKQYGDCLGDIAARDLICAQKFNGLTVLPPLLTDEMIAQYTSALLAGTITSGWTFGAGAALQIPFAMQMAYRFNGIGVTQNVLYENQKLIANQFNSAIGKIQDSLSSTASALGKLQDVVNQNAQALNTLVKQLSSNFGAISSVLNDILSRLDPPEAEVQIDRLITGRLQSLQTYVTQQLIRAAEIRASANLAATKMSECVLGQSKRVDFCGKGYHLMSFPQSAPHGVVFLHVTYVPAQEKNFTTAPAICHDGKAHFPREGVFVSNGTHWFVTQRNFYEPQIITTDNTFVSGNCDVVIGIVNNTVYDPLQPELDSFKEELDKYFKNHTSPDVDLGDISGINASVVNIQKEIDRLNEVAKNLNESLIDLQELGKYEQGSGYIPEAPRDGQAYVRKDGEWVLLSTFLGRSLEVLFQGPGSLPETGGGSDYKDDDDKGGGGSGGGGSGGGGSGGGGSGGGGSHHHHHH

SEQ ID NO: 16 - protein, 1297 aa, Artificial Sequence
  SEQ ID NO:3 + N532P
MFVFLVLLPLVSSQCVNLTTRTQLPPAYTNSFTRGVYYPDKVFRSSVLHSTQDLFLPFFSNVTWFHAIHVSGTNGTKRFDNPVLPFNDGVYFASTEKSNIIRGWIFGTTLDSKTQSLLIVNNATNVVIKVCEFQFCNDPFLGVYYHKNNKSWMESEFRVYSSANNCTFEYVSQPFLMDLEGKQGNFKNLREFVFKNIDGYFKIYSKHTPINLVRDLPQGFSALEPLVDLPIGINITRFQTLLALHRSYLTPGDSSSGWTAGAAAYYVGYLQPRTFLLKYNENGTITDAVDCALDPLSETKCTLKSFTVEKGIYQTSNFRVQPTESIVRFPNITNLCPFGEVFNATRFASVYAWNRKRISNCVADYSVLYNSASFSTFKCYGVSPTKLNDLCFTNVYADSFVIRGDEVRQIAPGQTGKIADYNYKLPDDFTGCVIAWNSNNLDSKVGGNYNYLYRLFRKSNLKPFERDISTEIYQAGSTPCNGVEGFNCYFPLQSYGFQPTNGVGYQPYRVVVLSFELLHAPATVCGPKKSTPLVKNKCVNFNFNGLTGTGVLTESNKKFLPFQQFGRDIADTTDAVRDPQTLEILDITPCSFGGVSVITPGTNTSNQVAVLYQDVNCTEVPVAIHADQLTPTWRVYSTGSNVFQTRAGCLIGAEHVNNSYECDIPIGAGICASYQTQTNSPSRAGSVASQSIIAYTMSLGAENSVAYSNNSIAIPTNFTISVTTEILPVSMTKTSVDCTMYICGDSTECSNLLLQYGSFCTQLNRALTGIAVEQDKNTQEVFAQVKQIYKTPPIKDFGGFNFSQILPDPSKPSKRSFIEDLLFNKVTLADAGFIKQYGDCLGDIAARDLICAQKFNGLTVLPPLLTDEMIAQYTSALLAGTITSGWTFGAGAALQIPFAMQMAYRFNGIGVTQNVLYENQKLIANQFNSAIGKIQDSLSSTASALGKLQDVVNQNAQALNTLVKQLSSNFGAISSVLNDILSRLDPPEAEVQIDRLITGRLQSLQTYVTQQLIRAAEIRASANLAATKMSECVLGQSKRVDFCGKGYHLMSFPQSAPHGVVFLHVTYVPAQEKNFTTAPAICHDGKAHFPREGVFVSNGTHWFVTQRNFYEPQIITTDNTFVSGNCDVVIGIVNNTVYDPLQPELDSFKEELDKYFKNHTSPDVDLGDISGINASVVNIQKEIDRLNEVAKNLNESLIDLQELGKYEQGSGYIPEAPRDGQAYVRKDGEWVLLSTFLGRSLEVLFQGPGSLPETGGGSDYKDDDDKGGGGSGGGGSGGGGSGGGGSGGGGSHHHHHH

SEQ ID NO: 17 - protein, 1297 aa, Artificial Sequence
  SEQ ID NO:3 + G880C + F888C
MFVFLVLLPLVSSQCVNLTTRTQLPPAYTNSFTRGVYYPDKVFRSSVLHSTQDLFLPFFSNVTWFHAIHVSGTNGTKRFDNPVLPFNDGVYFASTEKSNIIRGWIFGTTLDSKTQSLLIVNNATNVVIKVCEFQFCNDPFLGVYYHKNNKSWMESEFRVYSSANNCTFEYVSQPFLMDLEGKQGNFKNLREFVFKNIDGYFKIYSKHTPINLVRDLPQGFSALEPLVDLPIGINITRFQTLLALHRSYLTPGDSSSGWTAGAAAYYVGYLQPRTFLLKYNENGTITDAVDCALDPLSETKCTLKSFTVEKGIYQTSNFRVQPTESIVRFPNITNLCPFGEVFNATRFASVYAWNRKRISNCVADYSVLYNSASFSTFKCYGVSPTKLNDLCFTNVYADSFVIRGDEVRQIAPGQTGKIADYNYKLPDDFTGCVIAWNSNNLDSKVGGNYNYLYRLFRKSNLKPFERDISTEIYQAGSTPCNGVEGFNCYFPLQSYGFQPTNGVGYQPYRVVVLSFELLHAPATVCGPKKSTNLVKNKCVNFNFNGLTGTGVLTESNKKFLPFQQFGRDIADTTDAVRDPQTLEILDITPCSFGGVSVITPGTNTSNQVAVLYQDVNCTEVPVAIHADQLTPTWRVYSTGSNVFQTRAGCLIGAEHVNNSYECDIPIGAGICASYQTQTNSPSRAGSVASQSIIAYTMSLGAENSVAYSNNSIAIPTNFTISVTTEILPVSMTKTSVDCTMYICGDSTECSNLLLQYGSFCTQLNRALTGIAVEQDKNTQEVFAQVKQIYKTPPIKDFGGFNFSQILPDPSKPSKRSFIEDLLFNKVTLADAGFIKQYGDCLGDIAARDLICAQKFNGLTVLPPLLTDEMIAQYTSALLACTITSGWTCGAGAALQIPFAMQMAYRFNGIGVTQNVLYENQKLIANQFNSAIGKIQDSLSSTASALGKLQDVVNQNAQALNTLVKQLSSNFGAISSVLNDILSRLDPPEAEVQIDRLITGRLQSLQTYVTQQLIRAAEIRASANLAATKMSECVLGQSKRVDFCGKGYHLMSFPQSAPHGVVFLHVTYVPAQEKNFTTAPAICHDGKAHFPREGVFVSNGTHWFVTQRNFYEPQIITTDNTFVSGNCDVVIGIVNNTVYDPLQPELDSFKEELDKYFKNHTSPDVDLGDISGINASVVNIQKEIDRLNEVAKNLNESLIDLQELGKYEQGSGYIPEAPRDGQAYVRKDGEWVLLSTFLGRSLEVLFQGPGSLPETGGGSDYKDDDDKGGGGSGGGGSGGGGSGGGGSGGGGSHHHHHH

SEQ ID NO: 18 - protein, 1297 aa, Artificial Sequence
  SEQ ID NO:3 + S884C + A893C
MFVFLVLLPLVSSQCVNLTTRTQLPPAYTNSFTRGVYYPDKVFRSSVLHSTQDLFLPFFSNVTWFHAIHVSGTNGTKRFDNPVLPFNDGVYFASTEKSNIIRGWIFGTTLDSKTQSLLIVNNATNVVIKVCEFQFCNDPFLGVYYHKNNKSWMESEFRVYSSANNCTFEYVSQPFLMDLEGKQGNFKNLREFVFKNIDGYFKIYSKHTPINLVRDLPQGFSALEPLVDLPIGINITRFQTLLALHRSYLTPGDSSSGWTAGAAAYYVGYLQPRTFLLKYNENGTITDAVDCALDPLSETKCTLKSFTVEKGIYQTSNFRVQPTESIVRFPNITNLCPFGEVFNATRFASVYAWNRKRISNCVADYSVLYNSASFSTFKCYGVSPTKLNDLCFTNVYADSFVIRGDEVRQIAPGQTGKIADYNYKLPDDFTGCVIAWNSNNLDSKVGGNYNYLYRLFRKSNLKPFERDISTEIYQAGSTPCNGVEGFNCYFPLQSYGFQPTNGVGYQPYRVVVLSFELLHAPATVCGPKKSTNLVKNKCVNFNFNGLTGTGVLTESNKKFLPFQQFGRDIADTTDAVRDPQTLEILDITPCSFGGVSVITPGTNTSNQVAVLYQDVNCTEVPVAIHADQLTPTWRVYSTGSNVFQTRAGCLIGAEHVNNSYECDIPIGAGICASYQTQTNSPSRAGSVASQSIIAYTMSLGAENSVAYSNNSIAIPTNFTISVTTEILPVSMTKTSVDCTMYICGDSTECSNLLLQYGSFCTQLNRALTGIAVEQDKNTQEVFAQVKQIYKTPPIKDFGGFNFSQILPDPSKPSKRSFIEDLLFNKVTLADAGFIKQYGDCLGDIAARDLICAQKFNGLTVLPPLLTDEMIAQYTSALLAGTITCGWTFGAGACLQIPFAMQMAYRFNGIGVTQNVLYENQKLIANQFNSAIGKIQDSLSSTASALGKLQDVVNQNAQALNTLVKQLSSNFGAISSVLNDILSRLDPPEAEVQIDRLITGRLQSLQTYVTQQLIRAAEIRASANLAATKMSECVLGQSKRVDFCGKGYHLMSFPQSAPHGVVFLHVTYVPAQEKNFTTAPAICHDGKAHFPREGVFVSNGTHWFVTQRNFYEPQIITTDNTFVSGNCDVVIGIVNNTVYDPLQPELDSFKEELDKYFKNHTSPDVDLGDISGINASVVNIQKEIDRLNEVAKNLNESLIDLQELGKYEQGSGYIPEAPRDGQAYVRKDGEWVLLSTFLGRSLEVLFQGPGSLPETGGGSDYKDDDDKGGGGSGGGGSGGGGSGGGGSGGGGSHHHHHH

SEQ ID NO: 19 - protein, 1297 aa, Artificial Sequence
  SEQ ID NO:2 + A942P + A892P
MFVFLVLLPLVSSQCVNLTTRTQLPPAYTNSFTRGVYYPDKVFRSSVLHSTQDLFLPFFSNVTWFHAIHVSGTNGTKRFDNPVLPFNDGVYFASTEKSNIIRGWIFGTTLDSKTQSLLIVNNATNVVIKVCEFQFCNDPFLGVYYHKNNKSWMESEFRVYSSANNCTFEYVSQPFLMDLEGKQGNFKNLREFVFKNIDGYFKIYSKHTPINLVRDLPQGFSALEPLVDLPIGINITRFQTLLALHRSYLTPGDSSSGWTAGAAAYYVGYLQPRTFLLKYNENGTITDAVDCALDPLSETKCTLKSFTVEKGIYQTSNFRVQPTESIVRFPNITNLCPFGEVFNATRFASVYAWNRKRISNCVADYSVLYNSASFSTFKCYGVSPTKLNDLCFTNVYADSFVIRGDEVRQIAPGQTGKIADYNYKLPDDFTGCVIAWNSNNLDSKVGGNYNYLYRLFRKSNLKPFERDISTEIYQAGSTPCNGVEGFNCYFPLQSYGFQPTNGVGYQPYRVVVLSFELLHAPATVCGPKKSTNLVKNKCVNFNFNGLTGTGVLTESNKKFLPFQQFGRDIADTTDAVRDPQTLEILDITPCSFGGVSVITPGTNTSNQVAVLYQDVNCTEVPVAIHADQLTPTWRVYSTGSNVFQTRAGCLIGAEHVNNSYECDIPIGAGICASYQTQTNSPSRAGSVASQSIIAYTMSLGAENSVAYSNNSIAIPTNFTISVTTEILPVSMTKTSVDCTMYICGDSTECSNLLLQYGSFCTQLNRALTGIAVEQDKNTQEVFAQVKQIYKTPPIKDFGGFNFSQILPDPSKPSKRSFIEDLLFNKVTLADAGFIKQYGDCLGDIAARDLICAQKFNGLTVLPPLLTDEMIAQYTSALLAGTITSGWTFGAGPALQIPFAMQMAYRFNGIGVTQNVLYENQKLIANQFNSAIGKIQDSLSSTPSALGKLQDVVNQNAQALNTLVKQLSSNFGAISSVLNDILSRLDKVEAEVQIDRLITGRLQSLQTYVTQQLIRAAEIRASANLAATKMSECVLGQSKRVDFCGKGYHLMSFPQSAPHGVVFLHVTYVPAQEKNFTTAPAICHDGKAHFPREGVFVSNGTHWFVTQRNFYEPQIITTDNTFVSGNCDVVIGIVNNTVYDPLQPELDSFKEELDKYFKNHTSPDVDLGDISGINASVVNIQKEIDRLNEVAKNLNESLIDLQELGKYEQGSGYIPEAPRDGQAYVRKDGEWVLLSTFLGRSLEVLFQGPGSLPETGGGSDYKDDDDKGGGGSGGGGSGGGGSGGGGSGGGGSHHHHHH

SEQ ID NO: 20 - protein, 1297 aa, Artificial Sequence
  SEQ ID NO:2 + A942P + D614N
MFVFLVLLPLVSSQCVNLTTRTQLPPAYTNSFTRGVYYPDKVFRSSVLHSTQDLFLPFFSNVTWFHAIHVSGTNGTKRFDNPVLPFNDGVYFASTEKSNIIRGWIFGTTLDSKTQSLLIVNNATNVVIKVCEFQFCNDPFLGVYYHKNNKSWMESEFRVYSSANNCTFEYVSQPFLMDLEGKQGNFKNLREFVFKNIDGYFKIYSKHTPINLVRDLPQGFSALEPLVDLPIGINITRFQTLLALHRSYLTPGDSSSGWTAGAAAYYVGYLQPRTFLLKYNENGTITDAVDCALDPLSETKCTLKSFTVEKGIYQTSNFRVQPTESIVRFPNITNLCPFGEVFNATRFASVYAWNRKRISNCVADYSVLYNSASFSTFKCYGVSPTKLNDLCFTNVYADSFVIRGDEVRQIAPGQTGKIADYNYKLPDDFTGCVIAWNSNNLDSKVGGNYNYLYRLFRKSNLKPFERDISTEIYQAGSTPCNGVEGFNCYFPLQSYGFQPTNGVGYQPYRVVVLSFELLHAPATVCGPKKSTNLVKNKCVNFNFNGLTGTGVLTESNKKFLPFQQFGRDIADTTDAVRDPQTLEILDITPCSFGGVSVITPGTNTSNQVAVLYQNVNCTEVPVAIHADQLTPTWRVYSTGSNVFQTRAGCLIGAEHVNNSYECDIPIGAGICASYQTQTNSPSRAGSVASQSIIAYTMSLGAENSVAYSNNSIAIPTNFTISVTTEILPVSMTKTSVDCTMYICGDSTECSNLLLQYGSFCTQLNRALTGIAVEQDKNTQEVFAQVKQIYKTPPIKDFGGFNFSQILPDPSKPSKRSFIEDLLFNKVTLADAGFIKQYGDCLGDIAARDLICAQKFNGLTVLPPLLTDEMIAQYTSALLAGTITSGWTFGAGAALQIPFAMQMAYRFNGIGVTQNVLYENQKLIANQFNSAIGKIQDSLSSTPSALGKLQDVVNQNAQALNTLVKQLSSNFGAISSVLNDILSRLDKVEAEVQIDRLITGRLQSLQTYVTQQLIRAAEIRASANLAATKMSECVLGQSKRVDFCGKGYHLMSFPQSAPHGVVFLHVTYVPAQEKNFTTAPAICHDGKAHFPREGVFVSNGTHWFVTQRNFYEPQIITTDNTFVSGNCDVVIGIVNNTVYDPLQPELDSFKEELDKYFKNHTSPDVDLGDISGINASVVNIQKEIDRLNEVAKNLNESLIDLQELGKYEQGSGYIPEAPRDGQAYVRKDGEWVLLSTFLGRSLEVLFQGPGSLPETGGGSDYKDDDDKGGGGSGGGGSGGGGSGGGGSGGGGSHHHHHH

SEQ ID NO: 21 - protein, 1297 aa, Artificial Sequence
  SEQ ID NO:2 + A942P + T572I
MFVFLVLLPLVSSQCVNLTTRTQLPPAYTNSFTRGVYYPDKVFRSSVLHSTQDLFLPFFSNVTWFHAIHVSGTNGTKRFDNPVLPFNDGVYFASTEKSNIIRGWIFGTTLDSKTQSLLIVNNATNVVIKVCEFQFCNDPFLGVYYHKNNKSWMESEFRVYSSANNCTFEYVSQPFLMDLEGKQGNFKNLREFVFKNIDGYFKIYSKHTPINLVRDLPQGFSALEPLVDLPIGINITRFQTLLALHRSYLTPGDSSSGWTAGAAAYYVGYLQPRTFLLKYNENGTITDAVDCALDPLSETKCTLKSFTVEKGIYQTSNFRVQPTESIVRFPNITNLCPFGEVFNATRFASVYAWNRKRISNCVADYSVLYNSASFSTFKCYGVSPTKLNDLCFTNVYADSFVIRGDEVRQIAPGQTGKIADYNYKLPDDFTGCVIAWNSNNLDSKVGGNYNYLYRLFRKSNLKPFERDISTEIYQAGSTPCNGVEGFNCYFPLQSYGFQPTNGVGYQPYRVVVLSFELLHAPATVCGPKKSTNLVKNKCVNFNFNGLTGTGVLTESNKKFLPFQQFGRDIADITDAVRDPQTLEILDITPCSFGGVSVITPGTNTSNQVAVLYQDVNCTEVPVAIHADQLTPTWRVYSTGSNVFQTRAGCLIGAEHVNNSYECDIPIGAGICASYQTQTNSPSRAGSVASQSIIAYTMSLGAENSVAYSNNSIAIPTNFTISVTTEILPVSMTKTSVDCTMYICGDSTECSNLLLQYGSFCTQLNRALTGIAVEQDKNTQEVFAQVKQIYKTPPIKDFGGFNFSQILPDPSKPSKRSFIEDLLFNKVTLADAGFIKQYGDCLGDIAARDLICAQKFNGLTVLPPLLTDEMIAQYTSALLAGTITSGWTFGAGAALQIPFAMQMAYRFNGIGVTQNVLYENQKLIANQFNSAIGKIQDSLSSTPSALGKLQDVVNQNAQALNTLVKQLSSNFGAISSVLNDILSRLDKVEAEVQIDRLITGRLQSLQTYVTQQLIRAAEIRASANLAATKMSECVLGQSKRVDFCGKGYHLMSFPQSAPHGVVFLHVTYVPAQEKNFTTAPAICHDGKAHFPREGVFVSNGTHWFVTQRNFYEPQIITTDNTFVSGNCDVVIGIVNNTVYDPLQPELDSFKEELDKYFKNHTSPDVDLGDISGINASVVNIQKEIDRLNEVAKNLNESLIDLQELGKYEQGSGYIPEAPRDGQAYVRKDGEWVLLSTFLGRSLEVLFQGPGSLPETGGGSDYKDDDDKGGGGSGGGGSGGGGSGGGGSGGGGSHHHHHH

SEQ ID NO: 22 - protein, 1297 aa, Artificial Sequence
  SEQ ID NO:2 + A942P + N532P
MFVFLVLLPLVSSQCVNLTTRTQLPPAYTNSFTRGVYYPDKVFRSSVLHSTQDLFLPFFSNVTWFHAIHVSGTNGTKRFDNPVLPFNDGVYFASTEKSNIIRGWIFGTTLDSKTQSLLIVNNATNVVIKVCEFQFCNDPFLGVYYHKNNKSWMESEFRVYSSANNCTFEYVSQPFLMDLEGKQGNFKNLREFVFKNIDGYFKIYSKHTPINLVRDLPQGFSALEPLVDLPIGINITRFQTLLALHRSYLTPGDSSSGWTAGAAAYYVGYLQPRTFLLKYNENGTITDAVDCALDPLSETKCTLKSFTVEKGIYQTSNFRVQPTESIVRFPNITNLCPFGEVFNATRFASVYAWNRKRISNCVADYSVLYNSASFSTFKCYGVSPTKLNDLCFTNVYADSFVIRGDEVRQIAPGQTGKIADYNYKLPDDFTGCVIAWNSNNLDSKVGGNYNYLYRLFRKSNLKPFERDISTEIYQAGSTPCNGVEGFNCYFPLQSYGFQPTNGVGYQPYRVVVLSFELLHAPATVCGPKKSTPLVKNKCVNFNFNGLTGTGVLTESNKKFLPFQQFGRDIADTTDAVRDPQTLEILDITPCSFGGVSVITPGTNTSNQVAVLYQDVNCTEVPVAIHADQLTPTWRVYSTGSNVFQTRAGCLIGAEHVNNSYECDIPIGAGICASYQTQTNSPSRAGSVASQSIIAYTMSLGAENSVAYSNNSIAIPTNFTISVTTEILPVSMTKTSVDCTMYICGDSTECSNLLLQYGSFCTQLNRALTGIAVEQDKNTQEVFAQVKQIYKTPPIKDFGGFNFSQILPDPSKPSKRSFIEDLLFNKVTLADAGFIKQYGDCLGDIAARDLICAQKFNGLTVLPPLLTDEMIAQYTSALLAGTITSGWTFGAGAALQIPFAMQMAYRFNGIGVTQNVLYENQKLIANQFNSAIGKIQDSLSSTPSALGKLQDVVNQNAQALNTLVKQLSSNFGAISSVLNDILSRLDKVEAEVQIDRLITGRLQSLQTYVTQQLIRAAEIRASANLAATKMSECVLGQSKRVDFCGKGYHLMSFPQSAPHGVVFLHVTYVPAQEKNFTTAPAICHDGKAHFPREGVFVSNGTHWFVTQRNFYEPQIITTDNTFVSGNCDVVIGIVNNTVYDPLQPELDSFKEELDKYFKNHTSPDVDLGDISGINASVVNIQKEIDRLNEVAKNLNESLIDLQELGKYEQGSGYIPEAPRDGQAYVRKDGEWVLLSTFLGRSLEVLFQGPGSLPETGGGSDYKDDDDKGGGGSGGGGSGGGGSGGGGSGGGGSHHHHHH

SEQ ID NO: 23 - protein, 1297 aa, Artificial Sequence
  SEQ ID NO:2 + A942P + G880C + F888C
MFVFLVLLPLVSSQCVNLTTRTQLPPAYTNSFTRGVYYPDKVFRSSVLHSTQDLFLPFFSNVTWFHAIHVSGTNGTKRFDNPVLPFNDGVYFASTEKSNIIRGWIFGTTLDSKTQSLLIVNNATNVVIKVCEFQFCNDPFLGVYYHKNNKSWMESEFRVYSSANNCTFEYVSQPFLMDLEGKQGNFKNLREFVFKNIDGYFKIYSKHTPINLVRDLPQGFSALEPLVDLPIGINITRFQTLLALHRSYLTPGDSSSGWTAGAAAYYVGYLQPRTFLLKYNENGTITDAVDCALDPLSETKCTLKSFTVEKGIYQTSNFRVQPTESIVRFPNITNLCPFGEVFNATRFASVYAWNRKRISNCVADYSVLYNSASFSTFKCYGVSPTKLNDLCFTNVYADSFVIRGDEVRQIAPGQTGKIADYNYKLPDDFTGCVIAWNSNNLDSKVGGNYNYLYRLFRKSNLKPFERDISTEIYQAGSTPCNGVEGFNCYFPLQSYGFQPTNGVGYQPYRVVVLSFELLHAPATVCGPKKSTNLVKNKCVNFNFNGLTGTGVLTESNKKFLPFQQFGRDIADTTDAVRDPQTLEILDITPCSFGGVSVITPGTNTSNQVAVLYQDVNCTEVPVAIHADQLTPTWRVYSTGSNVFQTRAGCLIGAEHVNNSYECDIPIGAGICASYQTQTNSPSRAGSVASQSIIAYTMSLGAENSVAYSNNSIAIPTNFTISVTTEILPVSMTKTSVDCTMYICGDSTECSNLLLQYGSFCTQLNRALTGIAVEQDKNTQEVFAQVKQIYKTPPIKDFGGFNFSQILPDPSKPSKRSFIEDLLFNKVTLADAGFIKQYGDCLGDIAARDLICAQKFNGLTVLPPLLTDEMIAQYTSALLACTITSGWTCGAGAALQIPFAMQMAYRFNGIGVTQNVLYENQKLIANQFNSAIGKIQDSLSSTPSALGKLQDVVNQNAQALNTLVKQLSSNFGAISSVLNDILSRLDKVEAEVQIDRLITGRLQSLQTYVTQQLIRAAEIRASANLAATKMSECVLGQSKRVDFCGKGYHLMSFPQSAPHGVVFLHVTYVPAQEKNFTTAPAICHDGKAHFPREGVFVSNGTHWFVTQRNFYEPQIITTDNTFVSGNCDVVIGIVNNTVYDPLQPELDSFKEELDKYFKNHTSPDVDLGDISGINASVVNIQKEIDRLNEVAKNLNESLIDLQELGKYEQGSGYIPEAPRDGQAYVRKDGEWVLLSTFLGRSLEVLFQGPGSLPETGGGSDYKDDDDKGGGGSGGGGSGGGGSGGGGSGGGGSHHHHHH

SEQ ID NO: 24 - protein, 1297 aa, Artificial Sequence
  SEQ ID NO:2 + A942P + S884C + A893C
MFVFLVLLPLVSSQCVNLTTRTQLPPAYTNSFTRGVYYPDKVFRSSVLHSTQDLFLPFFSNVTWFHAIHVSGTNGTKRFDNPVLPFNDGVYFASTEKSNIIRGWIFGTTLDSKTQSLLIVNNATNVVIKVCEFQFCNDPFLGVYYHKNNKSWMESEFRVYSSANNCTFEYVSQPFLMDLEGKQGNFKNLREFVFKNIDGYFKIYSKHTPINLVRDLPQGFSALEPLVDLPIGINITRFQTLLALHRSYLTPGDSSSGWTAGAAAYYVGYLQPRTFLLKYNENGTITDAVDCALDPLSETKCTLKSFTVEKGIYQTSNFRVQPTESIVRFPNITNLCPFGEVFNATRFASVYAWNRKRISNCVADYSVLYNSASFSTFKCYGVSPTKLNDLCFTNVYADSFVIRGDEVRQIAPGQTGKIADYNYKLPDDFTGCVIAWNSNNLDSKVGGNYNYLYRLFRKSNLKPFERDISTEIYQAGSTPCNGVEGFNCYFPLQSYGFQPTNGVGYQPYRVVVLSFELLHAPATVCGPKKSTNLVKNKCVNFNFNGLTGTGVLTESNKKFLPFQQFGRDIADTTDAVRDPQTLEILDITPCSFGGVSVITPGTNTSNQVAVLYQDVNCTEVPVAIHADQLTPTWRVYSTGSNVFQTRAGCLIGAEHVNNSYECDIPIGAGICASYQTQTNSPSRAGSVASQSIIAYTMSLGAENSVAYSNNSIAIPTNFTISVTTEILPVSMTKTSVDCTMYICGDSTECSNLLLQYGSFCTQLNRALTGIAVEQDKNTQEVFAQVKQIYKTPPIKDFGGFNFSQILPDPSKPSKRSFIEDLLFNKVTLADAGFIKQYGDCLGDIAARDLICAQKFNGLTVLPPLLTDEMIAQYTSALLAGTITCGWTFGAGACLQIPFAMQMAYRFNGIGVTQNVLYENQKLIANQFNSAIGKIQDSLSSTPSALGKLQDVVNQNAQALNTLVKQLSSNFGAISSVLNDILSRLDKVEAEVQIDRLITGRLQSLQTYVTQQLIRAAEIRASANLAATKMSECVLGQSKRVDFCGKGYHLMSFPQSAPHGVVFLHVTYVPAQEKNFTTAPAICHDGKAHFPREGVFVSNGTHWFVTQRNFYEPQIITTDNTFVSGNCDVVIGIVNNTVYDPLQPELDSFKEELDKYFKNHTSPDVDLGDISGINASVVNIQKEIDRLNEVAKNLNESLIDLQELGKYEQGSGYIPEAPRDGQAYVRKDGEWVLLSTFLGRSLEVLFQGPGSLPETGGGSDYKDDDDKGGGGSGGGGSGGGGSGGGGSGGGGSHHHHHH

SEQ ID NO: 25 - protein, 1297 aa, Artificial Sequence
  SEQ ID NO:2 + A892P + D614N
MFVFLVLLPLVSSQCVNLTTRTQLPPAYTNSFTRGVYYPDKVFRSSVLHSTQDLFLPFFSNVTWFHAIHVSGTNGTKRFDNPVLPFNDGVYFASTEKSNIIRGWIFGTTLDSKTQSLLIVNNATNVVIKVCEFQFCNDPFLGVYYHKNNKSWMESEFRVYSSANNCTFEYVSQPFLMDLEGKQGNFKNLREFVFKNIDGYFKIYSKHTPINLVRDLPQGFSALEPLVDLPIGINITRFQTLLALHRSYLTPGDSSSGWTAGAAAYYVGYLQPRTFLLKYNENGTITDAVDCALDPLSETKCTLKSFTVEKGIYQTSNFRVQPTESIVRFPNITNLCPFGEVFNATRFASVYAWNRKRISNCVADYSVLYNSASFSTFKCYGVSPTKLNDLCFTNVYADSFVIRGDEVRQIAPGQTGKIADYNYKLPDDFTGCVIAWNSNNLDSKVGGNYNYLYRLFRKSNLKPFERDISTEIYQAGSTPCNGVEGFNCYFPLQSYGFQPTNGVGYQPYRVVVLSFELLHAPATVCGPKKSTNLVKNKCVNFNFNGLTGTGVLTESNKKFLPFQQFGRDIADTTDAVRDPQTLEILDITPCSFGGVSVITPGTNTSNQVAVLYQNVNCTEVPVAIHADQLTPTWRVYSTGSNVFQTRAGCLIGAEHVNNSYECDIPIGAGICASYQTQTNSPSRAGSVASQSIIAYTMSLGAENSVAYSNNSIAIPTNFTISVTTEILPVSMTKTSVDCTMYICGDSTECSNLLLQYGSFCTQLNRALTGIAVEQDKNTQEVFAQVKQIYKTPPIKDFGGFNFSQILPDPSKPSKRSFIEDLLFNKVTLADAGFIKQYGDCLGDIAARDLICAQKFNGLTVLPPLLTDEMIAQYTSALLAGTITSGWTFGAGPALQIPFAMQMAYRFNGIGVTQNVLYENQKLIANQFNSAIGKIQDSLSSTASALGKLQDVVNQNAQALNTLVKQLSSNFGAISSVLNDILSRLDKVEAEVQIDRLITGRLQSLQTYVTQQLIRAAEIRASANLAATKMSECVLGQSKRVDFCGKGYHLMSFPQSAPHGVVFLHVTYVPAQEKNFTTAPAICHDGKAHFPREGVFVSNGTHWFVTQRNFYEPQIITTDNTFVSGNCDVVIGIVNNTVYDPLQPELDSFKEELDKYFKNHTSPDVDLGDISGINASVVNIQKEIDRLNEVAKNLNESLIDLQELGKYEQGSGYIPEAPRDGQAYVRKDGEWVLLSTFLGRSLEVLFQGPGSLPETGGGSDYKDDDDKGGGGSGGGGSGGGGSGGGGSGGGGSHHHHHH

SEQ ID NO: 26 - protein, 1297 aa, Artificial Sequence
  SEQ ID NO:2 + A892P + T572I
MFVFLVLLPLVSSQCVNLTTRTQLPPAYTNSFTRGVYYPDKVFRSSVLHSTQDLFLPFFSNVTWFHAIHVSGTNGTKRFDNPVLPFNDGVYFASTEKSNIIRGWIFGTTLDSKTQSLLIVNNATNVVIKVCEFQFCNDPFLGVYYHKNNKSWMESEFRVYSSANNCTFEYVSQPFLMDLEGKQGNFKNLREFVFKNIDGYFKIYSKHTPINLVRDLPQGFSALEPLVDLPIGINITRFQTLLALHRSYLTPGDSSSGWTAGAAAYYVGYLQPRTFLLKYNENGTITDAVDCALDPLSETKCTLKSFTVEKGIYQTSNFRVQPTESIVRFPNITNLCPFGEVFNATRFASVYAWNRKRISNCVADYSVLYNSASFSTFKCYGVSPTKLNDLCFTNVYADSFVIRGDEVRQIAPGQTGKIADYNYKLPDDFTGCVIAWNSNNLDSKVGGNYNYLYRLFRKSNLKPFERDISTEIYQAGSTPCNGVEGFNCYFPLQSYGFQPTNGVGYQPYRVVVLSFELLHAPATVCGPKKSTNLVKNKCVNFNFNGLTGTGVLTESNKKFLPFQQFGRDIADITDAVRDPQTLEILDITPCSFGGVSVITPGTNTSNQVAVLYQDVNCTEVPVAIHADQLTPTWRVYSTGSNVFQTRAGCLIGAEHVNNSYECDIPIGAGICASYQTQTNSPSRAGSVASQSIIAYTMSLGAENSVAYSNNSIAIPTNFTISVTTEILPVSMTKTSVDCTMYICGDSTECSNLLLQYGSFCTQLNRALTGIAVEQDKNTQEVFAQVKQIYKTPPIKDFGGFNFSQILPDPSKPSKRSFIEDLLFNKVTLADAGFIKQYGDCLGDIAARDLICAQKFNGLTVLPPLLTDEMIAQYTSALLAGTITSGWTFGAGPALQIPFAMQMAYRFNGIGVTQNVLYENQKLIANQFNSAIGKIQDSLSSTASALGKLQDVVNQNAQALNTLVKQLSSNFGAISSVLNDILSRLDKVEAEVQIDRLITGRLQSLQTYVTQQLIRAAEIRASANLAATKMSECVLGQSKRVDFCGKGYHLMSFPQSAPHGVVFLHVTYVPAQEKNFTTAPAICHDGKAHFPREGVFVSNGTHWFVTQRNFYEPQIITTDNTFVSGNCDVVIGIVNNTVYDPLQPELDSFKEELDKYFKNHTSPDVDLGDISGINASVVNIQKEIDRLNEVAKNLNESLIDLQELGKYEQGSGYIPEAPRDGQAYVRKDGEWVLLSTFLGRSLEVLFQGPGSLPETGGGSDYKDDDDKGGGGSGGGGSGGGGSGGGGSGGGGSHHHHHH

SEQ ID NO: 27 - protein, 1297 aa, Artificial Sequence
  SEQ ID NO:2 + A892P + N532P
MFVFLVLLPLVSSQCVNLTTRTQLPPAYTNSFTRGVYYPDKVFRSSVLHSTQDLFLPFFSNVTWFHAIHVSGTNGTKRFDNPVLPFNDGVYFASTEKSNIIRGWIFGTTLDSKTQSLLIVNNATNVVIKVCEFQFCNDPFLGVYYHKNNKSWMESEFRVYSSANNCTFEYVSQPFLMDLEGKQGNFKNLREFVFKNIDGYFKIYSKHTPINLVRDLPQGFSALEPLVDLPIGINITRFQTLLALHRSYLTPGDSSSGWTAGAAAYYVGYLQPRTFLLKYNENGTITDAVDCALDPLSETKCTLKSFTVEKGIYQTSNFRVQPTESIVRFPNITNLCPFGEVFNATRFASVYAWNRKRISNCVADYSVLYNSASFSTFKCYGVSPTKLNDLCFTNVYADSFVIRGDEVRQIAPGQTGKIADYNYKLPDDFTGCVIAWNSNNLDSKVGGNYNYLYRLFRKSNLKPFERDISTEIYQAGSTPCNGVEGFNCYFPLQSYGFQPTNGVGYQPYRVVVLSFELLHAPATVCGPKKSTPLVKNKCVNFNFNGLTGTGVLTESNKKFLPFQQFGRDIADTTDAVRDPQTLEILDITPCSFGGVSVITPGTNTSNQVAVLYQDVNCTEVPVAIHADQLTPTWRVYSTGSNVFQTRAGCLIGAEHVNNSYECDIPIGAGICASYQTQTNSPSRAGSVASQSIIAYTMSLGAENSVAYSNNSIAIPTNFTISVTTEILPVSMTKTSVDCTMYICGDSTECSNLLLQYGSFCTQLNRALTGIAVEQDKNTQEVFAQVKQIYKTPPIKDFGGFNFSQILPDPSKPSKRSFIEDLLFNKVTLADAGFIKQYGDCLGDIAARDLICAQKFNGLTVLPPLLTDEMIAQYTSALLAGTITSGWTFGAGPALQIPFAMQMAYRFNGIGVTQNVLYENQKLIANQFNSAIGKIQDSLSSTASALGKLQDVVNQNAQALNTLVKQLSSNFGAISSVLNDILSRLDKVEAEVQIDRLITGRLQSLQTYVTQQLIRAAEIRASANLAATKMSECVLGQSKRVDFCGKGYHLMSFPQSAPHGVVFLHVTYVPAQEKNFTTAPAICHDGKAHFPREGVFVSNGTHWFVTQRNFYEPQIITTDNTFVSGNCDVVIGIVNNTVYDPLQPELDSFKEELDKYFKNHTSPDVDLGDISGINASVVNIQKEIDRLNEVAKNLNESLIDLQELGKYEQGSGYIPEAPRDGQAYVRKDGEWVLLSTFLGRSLEVLFQGPGSLPETGGGSDYKDDDDKGGGGSGGGGSGGGGSGGGGSGGGGSHHHHHH

SEQ ID NO: 28 - protein, 1297 aa, Artificial Sequence
  SEQ ID NO:2 + A892P + G880C + F888C
MFVFLVLLPLVSSQCVNLTTRTQLPPAYTNSFTRGVYYPDKVFRSSVLHSTQDLFLPFFSNVTWFHAIHVSGTNGTKRFDNPVLPFNDGVYFASTEKSNIIRGWIFGTTLDSKTQSLLIVNNATNVVIKVCEFQFCNDPFLGVYYHKNNKSWMESEFRVYSSANNCTFEYVSQPFLMDLEGKQGNFKNLREFVFKNIDGYFKIYSKHTPINLVRDLPQGFSALEPLVDLPIGINITRFQTLLALHRSYLTPGDSSSGWTAGAAAYYVGYLQPRTFLLKYNENGTITDAVDCALDPLSETKCTLKSFTVEKGIYQTSNFRVQPTESIVRFPNITNLCPFGEVFNATRFASVYAWNRKRISNCVADYSVLYNSASFSTFKCYGVSPTKLNDLCFTNVYADSFVIRGDEVRQIAPGQTGKIADYNYKLPDDFTGCVIAWNSNNLDSKVGGNYNYLYRLFRKSNLKPFERDISTEIYQAGSTPCNGVEGFNCYFPLQSYGFQPTNGVGYQPYRVVVLSFELLHAPATVCGPKKSTNLVKNKCVNFNFNGLTGTGVLTESNKKFLPFQQFGRDIADTTDAVRDPQTLEILDITPCSFGGVSVITPGTNTSNQVAVLYQDVNCTEVPVAIHADQLTPTWRVYSTGSNVFQTRAGCLIGAEHVNNSYECDIPIGAGICASYQTQTNSPSRAGSVASQSIIAYTMSLGAENSVAYSNNSIAIPTNFTISVTTEILPVSMTKTSVDCTMYICGDSTECSNLLLQYGSFCTQLNRALTGIAVEQDKNTQEVFAQVKQIYKTPPIKDFGGFNFSQILPDPSKPSKRSFIEDLLFNKVTLADAGFIKQYGDCLGDIAARDLICAQKFNGLTVLPPLLTDEMIAQYTSALLACTITSGWTCGAGPALQIPFAMQMAYRFNGIGVTQNVLYENQKLIANQFNSAIGKIQDSLSSTASALGKLQDVVNQNAQALNTLVKQLSSNFGAISSVLNDILSRLDKVEAEVQIDRLITGRLQSLQTYVTQQLIRAAEIRASANLAATKMSECVLGQSKRVDFCGKGYHLMSFPQSAPHGVVFLHVTYVPAQEKNFTTAPAICHDGKAHFPREGVFVSNGTHWFVTQRNFYEPQIITTDNTFVSGNCDVVIGIVNNTVYDPLQPELDSFKEELDKYFKNHTSPDVDLGDISGINASVVNIQKEIDRLNEVAKNLNESLIDLQELGKYEQGSGYIPEAPRDGQAYVRKDGEWVLLSTFLGRSLEVLFQGPGSLPETGGGSDYKDDDDKGGGGSGGGGSGGGGSGGGGSGGGGSHHHHHH

SEQ ID NO: 29 - protein, 1297 aa, Artificial Sequence
  SEQ ID NO:2 + A892P + S884C +A893C
MFVFLVLLPLVSSQCVNLTTRTQLPPAYTNSFTRGVYYPDKVFRSSVLHSTQDLFLPFFSNVTWFHAIHVSGTNGTKRFDNPVLPFNDGVYFASTEKSNIIRGWIFGTTLDSKTQSLLIVNNATNVVIKVCEFQFCNDPFLGVYYHKNNKSWMESEFRVYSSANNCTFEYVSQPFLMDLEGKQGNFKNLREFVFKNIDGYFKIYSKHTPINLVRDLPQGFSALEPLVDLPIGINITRFQTLLALHRSYLTPGDSSSGWTAGAAAYYVGYLQPRTFLLKYNENGTITDAVDCALDPLSETKCTLKSFTVEKGIYQTSNFRVQPTESIVRFPNITNLCPFGEVFNATRFASVYAWNRKRISNCVADYSVLYNSASFSTFKCYGVSPTKLNDLCFTNVYADSFVIRGDEVRQIAPGQTGKIADYNYKLPDDFTGCVIAWNSNNLDSKVGGNYNYLYRLFRKSNLKPFERDISTEIYQAGSTPCNGVEGFNCYFPLQSYGFQPTNGVGYQPYRVVVLSFELLHAPATVCGPKKSTNLVKNKCVNFNFNGLTGTGVLTESNKKFLPFQQFGRDIADTTDAVRDPQTLEILDITPCSFGGVSVITPGTNTSNQVAVLYQDVNCTEVPVAIHADQLTPTWRVYSTGSNVFQTRAGCLIGAEHVNNSYECDIPIGAGICASYQTQTNSPSRAGSVASQSIIAYTMSLGAENSVAYSNNSIAIPTNFTISVTTEILPVSMTKTSVDCTMYICGDSTECSNLLLQYGSFCTQLNRALTGIAVEQDKNTQEVFAQVKQIYKTPPIKDFGGFNFSQILPDPSKPSKRSFIEDLLFNKVTLADAGFIKQYGDCLGDIAARDLICAQKFNGLTVLPPLLTDEMIAQYTSALLAGTITCGWTFGAGPCLQIPFAMQMAYRFNGIGVTQNVLYENQKLIANQFNSAIGKIQDSLSSTASALGKLQDVVNQNAQALNTLVKQLSSNFGAISSVLNDILSRLDKVEAEVQIDRLITGRLQSLQTYVTQQLIRAAEIRASANLAATKMSECVLGQSKRVDFCGKGYHLMSFPQSAPHGVVFLHVTYVPAQEKNFTTAPAICHDGKAHFPREGVFVSNGTHWFVTQRNFYEPQIITTDNTFVSGNCDVVIGIVNNTVYDPLQPELDSFKEELDKYFKNHTSPDVDLGDISGINASVVNIQKEIDRLNEVAKNLNESLIDLQELGKYEQGSGYIPEAPRDGQAYVRKDGEWVLLSTFLGRSLEVLFQGPGSLPETGGGSDYKDDDDKGGGGSGGGGSGGGGSGGGGSGGGGSHHHHHH

SEQ ID NO: 30 - protein, 1297 aa, Artificial Sequence
  SEQ ID NO:2 + D614N + T572I
MFVFLVLLPLVSSQCVNLTTRTQLPPAYTNSFTRGVYYPDKVFRSSVLHSTQDLFLPFFSNVTWFHAIHVSGTNGTKRFDNPVLPFNDGVYFASTEKSNIIRGWIFGTTLDSKTQSLLIVNNATNVVIKVCEFQFCNDPFLGVYYHKNNKSWMESEFRVYSSANNCTFEYVSQPFLMDLEGKQGNFKNLREFVFKNIDGYFKIYSKHTPINLVRDLPQGFSALEPLVDLPIGINITRFQTLLALHRSYLTPGDSSSGWTAGAAAYYVGYLQPRTFLLKYNENGTITDAVDCALDPLSETKCTLKSFTVEKGIYQTSNFRVQPTESIVRFPNITNLCPFGEVFNATRFASVYAWNRKRISNCVADYSVLYNSASFSTFKCYGVSPTKLNDLCFTNVYADSFVIRGDEVRQIAPGQTGKIADYNYKLPDDFTGCVIAWNSNNLDSKVGGNYNYLYRLFRKSNLKPFERDISTEIYQAGSTPCNGVEGFNCYFPLQSYGFQPTNGVGYQPYRVVVLSFELLHAPATVCGPKKSTNLVKNKCVNFNFNGLTGTGVLTESNKKFLPFQQFGRDIADITDAVRDPQTLEILDITPCSFGGVSVITPGTNTSNQVAVLYQNVNCTEVPVAIHADQLTPTWRVYSTGSNVFQTRAGCLIGAEHVNNSYECDIPIGAGICASYQTQTNSPSRAGSVASQSIIAYTMSLGAENSVAYSNNSIAIPTNFTISVTTEILPVSMTKTSVDCTMYICGDSTECSNLLLQYGSFCTQLNRALTGIAVEQDKNTQEVFAQVKQIYKTPPIKDFGGFNFSQILPDPSKPSKRSFIEDLLFNKVTLADAGFIKQYGDCLGDIAARDLICAQKFNGLTVLPPLLTDEMIAQYTSALLAGTITSGWTFGAGAALQIPFAMQMAYRFNGIGVTQNVLYENQKLIANQFNSAIGKIQDSLSSTASALGKLQDVVNQNAQALNTLVKQLSSNFGAISSVLNDILSRLDKVEAEVQIDRLITGRLQSLQTYVTQQLIRAAEIRASANLAATKMSECVLGQSKRVDFCGKGYHLMSFPQSAPHGVVFLHVTYVPAQEKNFTTAPAICHDGKAHFPREGVFVSNGTHWFVTQRNFYEPQIITTDNTFVSGNCDVVIGIVNNTVYDPLQPELDSFKEELDKYFKNHTSPDVDLGDISGINASVVNIQKEIDRLNEVAKNLNESLIDLQELGKYEQGSGYIPEAPRDGQAYVRKDGEWVLLSTFLGRSLEVLFQGPGSLPETGGGSDYKDDDDKGGGGSGGGGSGGGGSGGGGSGGGGSHHHHHH

SEQ ID NO: 31 - protein, 1297 aa, Artificial Sequence
  SEQ ID NO:2 + D614N + N532P
MFVFLVLLPLVSSQCVNLTTRTQLPPAYTNSFTRGVYYPDKVFRSSVLHSTQDLFLPFFSNVTWFHAIHVSGTNGTKRFDNPVLPFNDGVYFASTEKSNIIRGWIFGTTLDSKTQSLLIVNNATNVVIKVCEFQFCNDPFLGVYYHKNNKSWMESEFRVYSSANNCTFEYVSQPFLMDLEGKQGNFKNLREFVFKNIDGYFKIYSKHTPINLVRDLPQGFSALEPLVDLPIGINITRFQTLLALHRSYLTPGDSSSGWTAGAAAYYVGYLQPRTFLLKYNENGTITDAVDCALDPLSETKCTLKSFTVEKGIYQTSNFRVQPTESIVRFPNITNLCPFGEVFNATRFASVYAWNRKRISNCVADYSVLYNSASFSTFKCYGVSPTKLNDLCFTNVYADSFVIRGDEVRQIAPGQTGKIADYNYKLPDDFTGCVIAWNSNNLDSKVGGNYNYLYRLFRKSNLKPFERDISTEIYQAGSTPCNGVEGFNCYFPLQSYGFQPTNGVGYQPYRVVVLSFELLHAPATVCGPKKSTPLVKNKCVNFNFNGLTGTGVLTESNKKFLPFQQFGRDIADTTDAVRDPQTLEILDITPCSFGGVSVITPGTNTSNQVAVLYQNVNCTEVPVAIHADQLTPTWRVYSTGSNVFQTRAGCLIGAEHVNNSYECDIPIGAGICASYQTQTNSPSRAGSVASQSIIAYTMSLGAENSVAYSNNSIAIPTNFTISVTTEILPVSMTKTSVDCTMYICGDSTECSNLLLQYGSFCTQLNRALTGIAVEQDKNTQEVFAQVKQIYKTPPIKDFGGFNFSQILPDPSKPSKRSFIEDLLFNKVTLADAGFIKQYGDCLGDIAARDLICAQKFNGLTVLPPLLTDEMIAQYTSALLAGTITSGWTFGAGAALQIPFAMQMAYRFNGIGVTQNVLYENQKLIANQFNSAIGKIQDSLSSTASALGKLQDVVNQNAQALNTLVKQLSSNFGAISSVLNDILSRLDKVEAEVQIDRLITGRLQSLQTYVTQQLIRAAEIRASANLAATKMSECVLGQSKRVDFCGKGYHLMSFPQSAPHGVVFLHVTYVPAQEKNFTTAPAICHDGKAHFPREGVFVSNGTHWFVTQRNFYEPQIITTDNTFVSGNCDVVIGIVNNTVYDPLQPELDSFKEELDKYFKNHTSPDVDLGDISGINASVVNIQKEIDRLNEVAKNLNESLIDLQELGKYEQGSGYIPEAPRDGQAYVRKDGEWVLLSTFLGRSLEVLFQGPGSLPETGGGSDYKDDDDKGGGGSGGGGSGGGGSGGGGSGGGGSHHHHHH

SEQ ID NO: 32 - protein, 1297 aa, Artificial Sequence
  SEQ ID NO:2 + D614N + G880C + F888C
MFVFLVLLPLVSSQCVNLTTRTQLPPAYTNSFTRGVYYPDKVFRSSVLHSTQDLFLPFFSNVTWFHAIHVSGTNGTKRFDNPVLPFNDGVYFASTEKSNIIRGWIFGTTLDSKTQSLLIVNNATNVVIKVCEFQFCNDPFLGVYYHKNNKSWMESEFRVYSSANNCTFEYVSQPFLMDLEGKQGNFKNLREFVFKNIDGYFKIYSKHTPINLVRDLPQGFSALEPLVDLPIGINITRFQTLLALHRSYLTPGDSSSGWTAGAAAYYVGYLQPRTFLLKYNENGTITDAVDCALDPLSETKCTLKSFTVEKGIYQTSNFRVQPTESIVRFPNITNLCPFGEVFNATRFASVYAWNRKRISNCVADYSVLYNSASFSTFKCYGVSPTKLNDLCFTNVYADSFVIRGDEVRQIAPGQTGKIADYNYKLPDDFTGCVIAWNSNNLDSKVGGNYNYLYRLFRKSNLKPFERDISTEIYQAGSTPCNGVEGFNCYFPLQSYGFQPTNGVGYQPYRVVVLSFELLHAPATVCGPKKSTNLVKNKCVNFNFNGLTGTGVLTESNKKFLPFQQFGRDIADTTDAVRDPQTLEILDITPCSFGGVSVITPGTNTSNQVAVLYQNVNCTEVPVAIHADQLTPTWRVYSTGSNVFQTRAGCLIGAEHVNNSYECDIPIGAGICASYQTQTNSPSRAGSVASQSIIAYTMSLGAENSVAYSNNSIAIPTNFTISVTTEILPVSMTKTSVDCTMYICGDSTECSNLLLQYGSFCTQLNRALTGIAVEQDKNTQEVFAQVKQIYKTPPIKDFGGFNFSQILPDPSKPSKRSFIEDLLFNKVTLADAGFIKQYGDCLGDIAARDLICAQKFNGLTVLPPLLTDEMIAQYTSALLACTITSGWTCGAGAALQIPFAMQMAYRFNGIGVTQNVLYENQKLIANQFNSAIGKIQDSLSSTASALGKLQDVVNQNAQALNTLVKQLSSNFGAISSVLNDILSRLDKVEAEVQIDRLITGRLQSLQTYVTQQLIRAAEIRASANLAATKMSECVLGQSKRVDFCGKGYHLMSFPQSAPHGVVFLHVTYVPAQEKNFTTAPAICHDGKAHFPREGVFVSNGTHWFVTQRNFYEPQIITTDNTFVSGNCDVVIGIVNNTVYDPLQPELDSFKEELDKYFKNHTSPDVDLGDISGINASVVNIQKEIDRLNEVAKNLNESLIDLQELGKYEQGSGYIPEAPRDGQAYVRKDGEWVLLSTFLGRSLEVLFQGPGSLPETGGGSDYKDDDDKGGGGSGGGGSGGGGSGGGGSGGGGSHHHHHH

SEQ ID NO: 33 - protein, 1297 aa, Artificial Sequence
  SEQ ID NO:2 + D614N + S884C + A893C
MFVFLVLLPLVSSQCVNLTTRTQLPPAYTNSFTRGVYYPDKVFRSSVLHSTQDLFLPFFSNVTWFHAIHVSGTNGTKRFDNPVLPFNDGVYFASTEKSNIIRGWIFGTTLDSKTQSLLIVNNATNVVIKVCEFQFCNDPFLGVYYHKNNKSWMESEFRVYSSANNCTFEYVSQPFLMDLEGKQGNFKNLREFVFKNIDGYFKIYSKHTPINLVRDLPQGFSALEPLVDLPIGINITRFQTLLALHRSYLTPGDSSSGWTAGAAAYYVGYLQPRTFLLKYNENGTITDAVDCALDPLSETKCTLKSFTVEKGIYQTSNFRVQPTESIVRFPNITNLCPFGEVFNATRFASVYAWNRKRISNCVADYSVLYNSASFSTFKCYGVSPTKLNDLCFTNVYADSFVIRGDEVRQIAPGQTGKIADYNYKLPDDFTGCVIAWNSNNLDSKVGGNYNYLYRLFRKSNLKPFERDISTEIYQAGSTPCNGVEGFNCYFPLQSYGFQPTNGVGYQPYRVVVLSFELLHAPATVCGPKKSTNLVKNKCVNFNFNGLTGTGVLTESNKKFLPFQQFGRDIADTTDAVRDPQTLEILDITPCSFGGVSVITPGTNTSNQVAVLYQNVNCTEVPVAIHADQLTPTWRVYSTGSNVFQTRAGCLIGAEHVNNSYECDIPIGAGICASYQTQTNSPSRAGSVASQSIIAYTMSLGAENSVAYSNNSIAIPTNFTISVTTEILPVSMTKTSVDCTMYICGDSTECSNLLLQYGSFCTQLNRALTGIAVEQDKNTQEVFAQVKQIYKTPPIKDFGGFNFSQILPDPSKPSKRSFIEDLLFNKVTLADAGFIKQYGDCLGDIAARDLICAQKFNGLTVLPPLLTDEMIAQYTSALLAGTITCGWTFGAGACLQIPFAMQMAYRFNGIGVTQNVLYENQKLIANQFNSAIGKIQDSLSSTASALGKLQDVVNQNAQALNTLVKQLSSNFGAISSVLNDILSRLDKVEAEVQIDRLITGRLQSLQTYVTQQLIRAAEIRASANLAATKMSECVLGQSKRVDFCGKGYHLMSFPQSAPHGVVFLHVTYVPAQEKNFTTAPAICHDGKAHFPREGVFVSNGTHWFVTQRNFYEPQIITTDNTFVSGNCDVVIGIVNNTVYDPLQPELDSFKEELDKYFKNHTSPDVDLGDISGINASVVNIQKEIDRLNEVAKNLNESLIDLQELGKYEQGSGYIPEAPRDGQAYVRKDGEWVLLSTFLGRSLEVLFQGPGSLPETGGGSDYKDDDDKGGGGSGGGGSGGGGSGGGGSGGGGSHHHHHH

SEQ ID NO: 34 - protein, 1297 aa, Artificial Sequence
  SEQ ID NO:2 + T572I + N532P
MFVFLVLLPLVSSQCVNLTTRTQLPPAYTNSFTRGVYYPDKVFRSSVLHSTQDLFLPFFSNVTWFHAIHVSGTNGTKRFDNPVLPFNDGVYFASTEKSNIIRGWIFGTTLDSKTQSLLIVNNATNVVIKVCEFQFCNDPFLGVYYHKNNKSWMESEFRVYSSANNCTFEYVSQPFLMDLEGKQGNFKNLREFVFKNIDGYFKIYSKHTPINLVRDLPQGFSALEPLVDLPIGINITRFQTLLALHRSYLTPGDSSSGWTAGAAAYYVGYLQPRTFLLKYNENGTITDAVDCALDPLSETKCTLKSFTVEKGIYQTSNFRVQPTESIVRFPNITNLCPFGEVFNATRFASVYAWNRKRISNCVADYSVLYNSASFSTFKCYGVSPTKLNDLCFTNVYADSFVIRGDEVRQIAPGQTGKIADYNYKLPDDFTGCVIAWNSNNLDSKVGGNYNYLYRLFRKSNLKPFERDISTEIYQAGSTPCNGVEGFNCYFPLQSYGFQPTNGVGYQPYRVVVLSFELLHAPATVCGPKKSTPLVKNKCVNFNFNGLTGTGVLTESNKKFLPFQQFGRDIADITDAVRDPQTLEILDITPCSFGGVSVITPGTNTSNQVAVLYQDVNCTEVPVAIHADQLTPTWRVYSTGSNVFQTRAGCLIGAEHVNNSYECDIPIGAGICASYQTQTNSPSRAGSVASQSIIAYTMSLGAENSVAYSNNSIAIPTNFTISVTTEILPVSMTKTSVDCTMYICGDSTECSNLLLQYGSFCTQLNRALTGIAVEQDKNTQEVFAQVKQIYKTPPIKDFGGFNFSQILPDPSKPSKRSFIEDLLFNKVTLADAGFIKQYGDCLGDIAARDLICAQKFNGLTVLPPLLTDEMIAQYTSALLAGTITSGWTFGAGAALQIPFAMQMAYRFNGIGVTQNVLYENQKLIANQFNSAIGKIQDSLSSTASALGKLQDVVNQNAQALNTLVKQLSSNFGAISSVLNDILSRLDKVEAEVQIDRLITGRLQSLQTYVTQQLIRAAEIRASANLAATKMSECVLGQSKRVDFCGKGYHLMSFPQSAPHGVVFLHVTYVPAQEKNFTTAPAICHDGKAHFPREGVFVSNGTHWFVTQRNFYEPQIITTDNTFVSGNCDVVIGIVNNTVYDPLQPELDSFKEELDKYFKNHTSPDVDLGDISGINASVVNIQKEIDRLNEVAKNLNESLIDLQELGKYEQGSGYIPEAPRDGQAYVRKDGEWVLLSTFLGRSLEVLFQGPGSLPETGGGSDYKDDDDKGGGGSGGGGSGGGGSGGGGSGGGGSHHHHHH

SEQ ID NO: 35 - protein, 1297 aa, Artificial Sequence
  SEQ ID NO:2 + T572I + G880C + F888C
MFVFLVLLPLVSSQCVNLTTRTQLPPAYTNSFTRGVYYPDKVFRSSVLHSTQDLFLPFFSNVTWFHAIHVSGTNGTKRFDNPVLPFNDGVYFASTEKSNIIRGWIFGTTLDSKTQSLLIVNNATNVVIKVCEFQFCNDPFLGVYYHKNNKSWMESEFRVYSSANNCTFEYVSQPFLMDLEGKQGNFKNLREFVFKNIDGYFKIYSKHTPINLVRDLPQGFSALEPLVDLPIGINITRFQTLLALHRSYLTPGDSSSGWTAGAAAYYVGYLQPRTFLLKYNENGTITDAVDCALDPLSETKCTLKSFTVEKGIYQTSNFRVQPTESIVRFPNITNLCPFGEVFNATRFASVYAWNRKRISNCVADYSVLYNSASFSTFKCYGVSPTKLNDLCFTNVYADSFVIRGDEVRQIAPGQTGKIADYNYKLPDDFTGCVIAWNSNNLDSKVGGNYNYLYRLFRKSNLKPFERDISTEIYQAGSTPCNGVEGFNCYFPLQSYGFQPTNGVGYQPYRVVVLSFELLHAPATVCGPKKSTNLVKNKCVNFNFNGLTGTGVLTESNKKFLPFQQFGRDIADITDAVRDPQTLEILDITPCSFGGVSVITPGTNTSNQVAVLYQDVNCTEVPVAIHADQLTPTWRVYSTGSNVFQTRAGCLIGAEHVNNSYECDIPIGAGICASYQTQTNSPSRAGSVASQSIIAYTMSLGAENSVAYSNNSIAIPTNFTISVTTEILPVSMTKTSVDCTMYICGDSTECSNLLLQYGSFCTQLNRALTGIAVEQDKNTQEVFAQVKQIYKTPPIKDFGGFNFSQILPDPSKPSKRSFIEDLLFNKVTLADAGFIKQYGDCLGDIAARDLICAQKFNGLTVLPPLLTDEMIAQYTSALLACTITSGWTCGAGAALQIPFAMQMAYRFNGIGVTQNVLYENQKLIANQFNSAIGKIQDSLSSTASALGKLQDVVNQNAQALNTLVKQLSSNFGAISSVLNDILSRLDKVEAEVQIDRLITGRLQSLQTYVTQQLIRAAEIRASANLAATKMSECVLGQSKRVDFCGKGYHLMSFPQSAPHGVVFLHVTYVPAQEKNFTTAPAICHDGKAHFPREGVFVSNGTHWFVTQRNFYEPQIITTDNTFVSGNCDVVIGIVNNTVYDPLQPELDSFKEELDKYFKNHTSPDVDLGDISGINASVVNIQKEIDRLNEVAKNLNESLIDLQELGKYEQGSGYIPEAPRDGQAYVRKDGEWVLLSTFLGRSLEVLFQGPGSLPETGGGSDYKDDDDKGGGGSGGGGSGGGGSGGGGSGGGGSHHHHHH

SEQ ID NO: 36 - protein, 1297 aa, Artificial Sequence
  SEQ ID NO:2 + T572I + S884 + A893C
MFVFLVLLPLVSSQCVNLTTRTQLPPAYTNSFTRGVYYPDKVFRSSVLHSTQDLFLPFFSNVTWFHAIHVSGTNGTKRFDNPVLPFNDGVYFASTEKSNIIRGWIFGTTLDSKTQSLLIVNNATNVVIKVCEFQFCNDPFLGVYYHKNNKSWMESEFRVYSSANNCTFEYVSQPFLMDLEGKQGNFKNLREFVFKNIDGYFKIYSKHTPINLVRDLPQGFSALEPLVDLPIGINITRFQTLLALHRSYLTPGDSSSGWTAGAAAYYVGYLQPRTFLLKYNENGTITDAVDCALDPLSETKCTLKSFTVEKGIYQTSNFRVQPTESIVRFPNITNLCPFGEVFNATRFASVYAWNRKRISNCVADYSVLYNSASFSTFKCYGVSPTKLNDLCFTNVYADSFVIRGDEVRQIAPGQTGKIADYNYKLPDDFTGCVIAWNSNNLDSKVGGNYNYLYRLFRKSNLKPFERDISTEIYQAGSTPCNGVEGFNCYFPLQSYGFQPTNGVGYQPYRVVVLSFELLHAPATVCGPKKSTNLVKNKCVNFNFNGLTGTGVLTESNKKFLPFQQFGRDIADITDAVRDPQTLEILDITPCSFGGVSVITPGTNTSNQVAVLYQDVNCTEVPVAIHADQLTPTWRVYSTGSNVFQTRAGCLIGAEHVNNSYECDIPIGAGICASYQTQTNSPSRAGSVASQSIIAYTMSLGAENSVAYSNNSIAIPTNFTISVTTEILPVSMTKTSVDCTMYICGDSTECSNLLLQYGSFCTQLNRALTGIAVEQDKNTQEVFAQVKQIYKTPPIKDFGGFNFSQILPDPSKPSKRSFIEDLLFNKVTLADAGFIKQYGDCLGDIAARDLICAQKFNGLTVLPPLLTDEMIAQYTSALLAGTITCGWTFGAGACLQIPFAMQMAYRFNGIGVTQNVLYENQKLIANQFNSAIGKIQDSLSSTASALGKLQDVVNQNAQALNTLVKQLSSNFGAISSVLNDILSRLDKVEAEVQIDRLITGRLQSLQTYVTQQLIRAAEIRASANLAATKMSECVLGQSKRVDFCGKGYHLMSFPQSAPHGVVFLHVTYVPAQEKNFTTAPAICHDGKAHFPREGVFVSNGTHWFVTQRNFYEPQIITTDNTFVSGNCDVVIGIVNNTVYDPLQPELDSFKEELDKYFKNHTSPDVDLGDISGINASVVNIQKEIDRLNEVAKNLNESLIDLQELGKYEQGSGYIPEAPRDGQAYVRKDGEWVLLSTFLGRSLEVLFQGPGSLPETGGGSDYKDDDDKGGGGSGGGGSGGGGSGGGGSGGGGSHHHHHH

SEQ ID NO: 37 - protein, 1297 aa, Artificial Sequence
  SEQ ID NO:2 + T532P + G880C + F888C
MFVFLVLLPLVSSQCVNLTTRTQLPPAYTNSFTRGVYYPDKVFRSSVLHSTQDLFLPFFSNVTWFHAIHVSGTNGTKRFDNPVLPFNDGVYFASTEKSNIIRGWIFGTTLDSKTQSLLIVNNATNVVIKVCEFQFCNDPFLGVYYHKNNKSWMESEFRVYSSANNCTFEYVSQPFLMDLEGKQGNFKNLREFVFKNIDGYFKIYSKHTPINLVRDLPQGFSALEPLVDLPIGINITRFQTLLALHRSYLTPGDSSSGWTAGAAAYYVGYLQPRTFLLKYNENGTITDAVDCALDPLSETKCTLKSFTVEKGIYQTSNFRVQPTESIVRFPNITNLCPFGEVFNATRFASVYAWNRKRISNCVADYSVLYNSASFSTFKCYGVSPTKLNDLCFTNVYADSFVIRGDEVRQIAPGQTGKIADYNYKLPDDFTGCVIAWNSNNLDSKVGGNYNYLYRLFRKSNLKPFERDISTEIYQAGSTPCNGVEGFNCYFPLQSYGFQPTNGVGYQPYRVVVLSFELLHAPATVCGPKKSTPLVKNKCVNFNFNGLTGTGVLTESNKKFLPFQQFGRDIADTTDAVRDPQTLEILDITPCSFGGVSVITPGTNTSNQVAVLYQDVNCTEVPVAIHADQLTPTWRVYSTGSNVFQTRAGCLIGAEHVNNSYECDIPIGAGICASYQTQTNSPSRAGSVASQSIIAYTMSLGAENSVAYSNNSIAIPTNFTISVTTEILPVSMTKTSVDCTMYICGDSTECSNLLLQYGSFCTQLNRALTGIAVEQDKNTQEVFAQVKQIYKTPPIKDFGGFNFSQILPDPSKPSKRSFIEDLLFNKVTLADAGFIKQYGDCLGDIAARDLICAQKFNGLTVLPPLLTDEMIAQYTSALLACTITSGWTCGAGAALQIPFAMQMAYRFNGIGVTQNVLYENQKLIANQFNSAIGKIQDSLSSTASALGKLQDVVNQNAQALNTLVKQLSSNFGAISSVLNDILSRLDKVEAEVQIDRLITGRLQSLQTYVTQQLIRAAEIRASANLAATKMSECVLGQSKRVDFCGKGYHLMSFPQSAPHGVVFLHVTYVPAQEKNFTTAPAICHDGKAHFPREGVFVSNGTHWFVTQRNFYEPQIITTDNTFVSGNCDVVIGIVNNTVYDPLQPELDSFKEELDKYFKNHTSPDVDLGDISGINASVVNIQKEIDRLNEVAKNLNESLIDLQELGKYEQGSGYIPEAPRDGQAYVRKDGEWVLLSTFLGRSLEVLFQGPGSLPETGGGSDYKDDDDKGGGGSGGGGSGGGGSGGGGSGGGGSHHHHHH

SEQ ID NO: 38 - protein, 1297 aa, Artificial Sequence
  SEQ ID NO:2 + T532P + S884C + A893C
MFVFLVLLPLVSSQCVNLTTRTQLPPAYTNSFTRGVYYPDKVFRSSVLHSTQDLFLPFFSNVTWFHAIHVSGTNGTKRFDNPVLPFNDGVYFASTEKSNIIRGWIFGTTLDSKTQSLLIVNNATNVVIKVCEFQFCNDPFLGVYYHKNNKSWMESEFRVYSSANNCTFEYVSQPFLMDLEGKQGNFKNLREFVFKNIDGYFKIYSKHTPINLVRDLPQGFSALEPLVDLPIGINITRFQTLLALHRSYLTPGDSSSGWTAGAAAYYVGYLQPRTFLLKYNENGTITDAVDCALDPLSETKCTLKSFTVEKGIYQTSNFRVQPTESIVRFPNITNLCPFGEVFNATRFASVYAWNRKRISNCVADYSVLYNSASFSTFKCYGVSPTKLNDLCFTNVYADSFVIRGDEVRQIAPGQTGKIADYNYKLPDDFTGCVIAWNSNNLDSKVGGNYNYLYRLFRKSNLKPFERDISTEIYQAGSTPCNGVEGFNCYFPLQSYGFQPTNGVGYQPYRVVVLSFELLHAPATVCGPKKSTPLVKNKCVNFNFNGLTGTGVLTESNKKFLPFQQFGRDIADTTDAVRDPQTLEILDITPCSFGGVSVITPGTNTSNQVAVLYQDVNCTEVPVAIHADQLTPTWRVYSTGSNVFQTRAGCLIGAEHVNNSYECDIPIGAGICASYQTQTNSPSRAGSVASQSIIAYTMSLGAENSVAYSNNSIAIPTNFTISVTTEILPVSMTKTSVDCTMYICGDSTECSNLLLQYGSFCTQLNRALTGIAVEQDKNTQEVFAQVKQIYKTPPIKDFGGFNFSQILPDPSKPSKRSFIEDLLFNKVTLADAGFIKQYGDCLGDIAARDLICAQKFNGLTVLPPLLTDEMIAQYTSALLAGTITCGWTFGAGACLQIPFAMQMAYRFNGIGVTQNVLYENQKLIANQFNSAIGKIQDSLSSTASALGKLQDVVNQNAQALNTLVKQLSSNFGAISSVLNDILSRLDKVEAEVQIDRLITGRLQSLQTYVTQQLIRAAEIRASANLAATKMSECVLGQSKRVDFCGKGYHLMSFPQSAPHGVVFLHVTYVPAQEKNFTTAPAICHDGKAHFPREGVFVSNGTHWFVTQRNFYEPQIITTDNTFVSGNCDVVIGIVNNTVYDPLQPELDSFKEELDKYFKNHTSPDVDLGDISGINASVVNIQKEIDRLNEVAKNLNESLIDLQELGKYEQGSGYIPEAPRDGQAYVRKDGEWVLLSTFLGRSLEVLFQGPGSLPETGGGSDYKDDDDKGGGGSGGGGSGGGGSGGGGSGGGGSHHHHHH

SEQ ID NO: 39 - protein, 1297 aa, Artificial Sequence
  SEQ ID NO:2 + A942P + A892P + D614N
MFVFLVLLPLVSSQCVNLTTRTQLPPAYTNSFTRGVYYPDKVFRSSVLHSTQDLFLPFFSNVTWFHAIHVSGTNGTKRFDNPVLPFNDGVYFASTEKSNIIRGWIFGTTLDSKTQSLLIVNNATNVVIKVCEFQFCNDPFLGVYYHKNNKSWMESEFRVYSSANNCTFEYVSQPFLMDLEGKQGNFKNLREFVFKNIDGYFKIYSKHTPINLVRDLPQGFSALEPLVDLPIGINITRFQTLLALHRSYLTPGDSSSGWTAGAAAYYVGYLQPRTFLLKYNENGTITDAVDCALDPLSETKCTLKSFTVEKGIYQTSNFRVQPTESIVRFPNITNLCPFGEVFNATRFASVYAWNRKRISNCVADYSVLYNSASFSTFKCYGVSPTKLNDLCFTNVYADSFVIRGDEVRQIAPGQTGKIADYNYKLPDDFTGCVIAWNSNNLDSKVGGNYNYLYRLFRKSNLKPFERDISTEIYQAGSTPCNGVEGFNCYFPLQSYGFQPTNGVGYQPYRVVVLSFELLHAPATVCGPKKSTNLVKNKCVNFNFNGLTGTGVLTESNKKFLPFQQFGRDIADTTDAVRDPQTLEILDITPCSFGGVSVITPGTNTSNQVAVLYQNVNCTEVPVAIHADQLTPTWRVYSTGSNVFQTRAGCLIGAEHVNNSYECDIPIGAGICASYQTQTNSPSRAGSVASQSIIAYTMSLGAENSVAYSNNSIAIPTNFTISVTTEILPVSMTKTSVDCTMYICGDSTECSNLLLQYGSFCTQLNRALTGIAVEQDKNTQEVFAQVKQIYKTPPIKDFGGFNFSQILPDPSKPSKRSFIEDLLFNKVTLADAGFIKQYGDCLGDIAARDLICAQKFNGLTVLPPLLTDEMIAQYTSALLAGTITSGWTFGAGPALQIPFAMQMAYRFNGIGVTQNVLYENQKLIANQFNSAIGKIQDSLSSTPSALGKLQDVVNQNAQALNTLVKQLSSNFGAISSVLNDILSRLDKVEAEVQIDRLITGRLQSLQTYVTQQLIRAAEIRASANLAATKMSECVLGQSKRVDFCGKGYHLMSFPQSAPHGVVFLHVTYVPAQEKNFTTAPAICHDGKAHFPREGVFVSNGTHWFVTQRNFYEPQIITTDNTFVSGNCDVVIGIVNNTVYDPLQPELDSFKEELDKYFKNHTSPDVDLGDISGINASVVNIQKEIDRLNEVAKNLNESLIDLQELGKYEQGSGYIPEAPRDGQAYVRKDGEWVLLSTFLGRSLEVLFQGPGSLPETGGGSDYKDDDDKGGGGSGGGGSGGGGSGGGGSGGGGSHHHHHH

SEQ ID NO: 40 - protein, 1297 aa, Artificial Sequence
  SEQ ID NO:2 + A942P + A892P + T572I
MFVFLVLLPLVSSQCVNLTTRTQLPPAYTNSFTRGVYYPDKVFRSSVLHSTQDLFLPFFSNVTWFHAIHVSGTNGTKRFDNPVLPFNDGVYFASTEKSNIIRGWIFGTTLDSKTQSLLIVNNATNVVIKVCEFQFCNDPFLGVYYHKNNKSWMESEFRVYSSANNCTFEYVSQPFLMDLEGKQGNFKNLREFVFKNIDGYFKIYSKHTPINLVRDLPQGFSALEPLVDLPIGINITRFQTLLALHRSYLTPGDSSSGWTAGAAAYYVGYLQPRTFLLKYNENGTITDAVDCALDPLSETKCTLKSFTVEKGIYQTSNFRVQPTESIVRFPNITNLCPFGEVFNATRFASVYAWNRKRISNCVADYSVLYNSASFSTFKCYGVSPTKLNDLCFTNVYADSFVIRGDEVRQIAPGQTGKIADYNYKLPDDFTGCVIAWNSNNLDSKVGGNYNYLYRLFRKSNLKPFERDISTEIYQAGSTPCNGVEGFNCYFPLQSYGFQPTNGVGYQPYRVVVLSFELLHAPATVCGPKKSTNLVKNKCVNFNFNGLTGTGVLTESNKKFLPFQQFGRDIADITDAVRDPQTLEILDITPCSFGGVSVITPGTNTSNQVAVLYQDVNCTEVPVAIHADQLTPTWRVYSTGSNVFQTRAGCLIGAEHVNNSYECDIPIGAGICASYQTQTNSPSRAGSVASQSIIAYTMSLGAENSVAYSNNSIAIPTNFTISVTTEILPVSMTKTSVDCTMYICGDSTECSNLLLQYGSFCTQLNRALTGIAVEQDKNTQEVFAQVKQIYKTPPIKDFGGFNFSQILPDPSKPSKRSFIEDLLFNKVTLADAGFIKQYGDCLGDIAARDLICAQKFNGLTVLPPLLTDEMIAQYTSALLAGTITSGWTFGAGPALQIPFAMQMAYRFNGIGVTQNVLYENQKLIANQFNSAIGKIQDSLSSTPSALGKLQDVVNQNAQALNTLVKQLSSNFGAISSVLNDILSRLDKVEAEVQIDRLITGRLQSLQTYVTQQLIRAAEIRASANLAATKMSECVLGQSKRVDFCGKGYHLMSFPQSAPHGVVFLHVTYVPAQEKNFTTAPAICHDGKAHFPREGVFVSNGTHWFVTQRNFYEPQIITTDNTFVSGNCDVVIGIVNNTVYDPLQPELDSFKEELDKYFKNHTSPDVDLGDISGINASVVNIQKEIDRLNEVAKNLNESLIDLQELGKYEQGSGYIPEAPRDGQAYVRKDGEWVLLSTFLGRSLEVLFQGPGSLPETGGGSDYKDDDDKGGGGSGGGGSGGGGSGGGGSGGGGSHHHHHH

SEQ ID NO: 41 - protein, 1297 aa, Artificial Sequence
  SEQ ID NO:2 + A942P + A892P + N532P
MFVFLVLLPLVSSQCVNLTTRTQLPPAYTNSFTRGVYYPDKVFRSSVLHSTQDLFLPFFSNVTWFHAIHVSGTNGTKRFDNPVLPFNDGVYFASTEKSNIIRGWIFGTTLDSKTQSLLIVNNATNVVIKVCEFQFCNDPFLGVYYHKNNKSWMESEFRVYSSANNCTFEYVSQPFLMDLEGKQGNFKNLREFVFKNIDGYFKIYSKHTPINLVRDLPQGFSALEPLVDLPIGINITRFQTLLALHRSYLTPGDSSSGWTAGAAAYYVGYLQPRTFLLKYNENGTITDAVDCALDPLSETKCTLKSFTVEKGIYQTSNFRVQPTESIVRFPNITNLCPFGEVFNATRFASVYAWNRKRISNCVADYSVLYNSASFSTFKCYGVSPTKLNDLCFTNVYADSFVIRGDEVRQIAPGQTGKIADYNYKLPDDFTGCVIAWNSNNLDSKVGGNYNYLYRLFRKSNLKPFERDISTEIYQAGSTPCNGVEGFNCYFPLQSYGFQPTNGVGYQPYRVVVLSFELLHAPATVCGPKKSTPLVKNKCVNFNFNGLTGTGVLTESNKKFLPFQQFGRDIADTTDAVRDPQTLEILDITPCSFGGVSVITPGTNTSNQVAVLYQDVNCTEVPVAIHADQLTPTWRVYSTGSNVFQTRAGCLIGAEHVNNSYECDIPIGAGICASYQTQTNSPSRAGSVASQSIIAYTMSLGAENSVAYSNNSIAIPTNFTISVTTEILPVSMTKTSVDCTMYICGDSTECSNLLLQYGSFCTQLNRALTGIAVEQDKNTQEVFAQVKQIYKTPPIKDFGGFNFSQILPDPSKPSKRSFIEDLLFNKVTLADAGFIKQYGDCLGDIAARDLICAQKFNGLTVLPPLLTDEMIAQYTSALLAGTITSGWTFGAGPALQIPFAMQMAYRFNGIGVTQNVLYENQKLIANQFNSAIGKIQDSLSSTPSALGKLQDVVNQNAQALNTLVKQLSSNFGAISSVLNDILSRLDKVEAEVQIDRLITGRLQSLQTYVTQQLIRAAEIRASANLAATKMSECVLGQSKRVDFCGKGYHLMSFPQSAPHGVVFLHVTYVPAQEKNFTTAPAICHDGKAHFPREGVFVSNGTHWFVTQRNFYEPQIITTDNTFVSGNCDVVIGIVNNTVYDPLQPELDSFKEELDKYFKNHTSPDVDLGDISGINASVVNIQKEIDRLNEVAKNLNESLIDLQELGKYEQGSGYIPEAPRDGQAYVRKDGEWVLLSTFLGRSLEVLFQGPGSLPETGGGSDYKDDDDKGGGGSGGGGSGGGGSGGGGSGGGGSHHHHHH

SEQ ID NO: 42 - protein, 1297 aa, Artificial Sequence
  SEQ ID NO:2 + A942P + A892P + G880C + F888C
MFVFLVLLPLVSSQCVNLTTRTQLPPAYTNSFTRGVYYPDKVFRSSVLHSTQDLFLPFFSNVTWFHAIHVSGTNGTKRFDNPVLPFNDGVYFASTEKSNIIRGWIFGTTLDSKTQSLLIVNNATNVVIKVCEFQFCNDPFLGVYYHKNNKSWMESEFRVYSSANNCTFEYVSQPFLMDLEGKQGNFKNLREFVFKNIDGYFKIYSKHTPINLVRDLPQGFSALEPLVDLPIGINITRFQTLLALHRSYLTPGDSSSGWTAGAAAYYVGYLQPRTFLLKYNENGTITDAVDCALDPLSETKCTLKSFTVEKGIYQTSNFRVQPTESIVRFPNITNLCPFGEVFNATRFASVYAWNRKRISNCVADYSVLYNSASFSTFKCYGVSPTKLNDLCFTNVYADSFVIRGDEVRQIAPGQTGKIADYNYKLPDDFTGCVIAWNSNNLDSKVGGNYNYLYRLFRKSNLKPFERDISTEIYQAGSTPCNGVEGFNCYFPLQSYGFQPTNGVGYQPYRVVVLSFELLHAPATVCGPKKSTNLVKNKCVNFNFNGLTGTGVLTESNKKFLPFQQFGRDIADTTDAVRDPQTLEILDITPCSFGGVSVITPGTNTSNQVAVLYQDVNCTEVPVAIHADQLTPTWRVYSTGSNVFQTRAGCLIGAEHVNNSYECDIPIGAGICASYQTQTNSPSRAGSVASQSIIAYTMSLGAENSVAYSNNSIAIPTNFTISVTTEILPVSMTKTSVDCTMYICGDSTECSNLLLQYGSFCTQLNRALTGIAVEQDKNTQEVFAQVKQIYKTPPIKDFGGFNFSQILPDPSKPSKRSFIEDLLFNKVTLADAGFIKQYGDCLGDIAARDLICAQKFNGLTVLPPLLTDEMIAQYTSALLACTITSGWTCGAGPALQIPFAMQMAYRFNGIGVTQNVLYENQKLIANQFNSAIGKIQDSLSSTPSALGKLQDVVNQNAQALNTLVKQLSSNFGAISSVLNDILSRLDKVEAEVQIDRLITGRLQSLQTYVTQQLIRAAEIRASANLAATKMSECVLGQSKRVDFCGKGYHLMSFPQSAPHGVVFLHVTYVPAQEKNFTTAPAICHDGKAHFPREGVFVSNGTHWFVTQRNFYEPQIITTDNTFVSGNCDVVIGIVNNTVYDPLQPELDSFKEELDKYFKNHTSPDVDLGDISGINASVVNIQKEIDRLNEVAKNLNESLIDLQELGKYEQGSGYIPEAPRDGQAYVRKDGEWVLLSTFLGRSLEVLFQGPGSLPETGGGSDYKDDDDKGGGGSGGGGSGGGGSGGGGSGGGGSHHHHHH

SEQ ID NO: 43 - protein, 1297 aa, Artificial Sequence
  SEQ ID NO:2 + A942P + A892P + S884C + A893C
MFVFLVLLPLVSSQCVNLTTRTQLPPAYTNSFTRGVYYPDKVFRSSVLHSTQDLFLPFFSNVTWFHAIHVSGTNGTKRFDNPVLPFNDGVYFASTEKSNIIRGWIFGTTLDSKTQSLLIVNNATNVVIKVCEFQFCNDPFLGVYYHKNNKSWMESEFRVYSSANNCTFEYVSQPFLMDLEGKQGNFKNLREFVFKNIDGYFKIYSKHTPINLVRDLPQGFSALEPLVDLPIGINITRFQTLLALHRSYLTPGDSSSGWTAGAAAYYVGYLQPRTFLLKYNENGTITDAVDCALDPLSETKCTLKSFTVEKGIYQTSNFRVQPTESIVRFPNITNLCPFGEVFNATRFASVYAWNRKRISNCVADYSVLYNSASFSTFKCYGVSPTKLNDLCFTNVYADSFVIRGDEVRQIAPGQTGKIADYNYKLPDDFTGCVIAWNSNNLDSKVGGNYNYLYRLFRKSNLKPFERDISTEIYQAGSTPCNGVEGFNCYFPLQSYGFQPTNGVGYQPYRVVVLSFELLHAPATVCGPKKSTNLVKNKCVNFNFNGLTGTGVLTESNKKFLPFQQFGRDIADTTDAVRDPQTLEILDITPCSFGGVSVITPGTNTSNQVAVLYQDVNCTEVPVAIHADQLTPTWRVYSTGSNVFQTRAGCLIGAEHVNNSYECDIPIGAGICASYQTQTNSPSRAGSVASQSIIAYTMSLGAENSVAYSNNSIAIPTNFTISVTTEILPVSMTKTSVDCTMYICGDSTECSNLLLQYGSFCTQLNRALTGIAVEQDKNTQEVFAQVKQIYKTPPIKDFGGFNFSQILPDPSKPSKRSFIEDLLFNKVTLADAGFIKQYGDCLGDIAARDLICAQKFNGLTVLPPLLTDEMIAQYTSALLAGTITCGWTFGAGPCLQIPFAMQMAYRFNGIGVTQNVLYENQKLIANQFNSAIGKIQDSLSSTPSALGKLQDVVNQNAQALNTLVKQLSSNFGAISSVLNDILSRLDKVEAEVQIDRLITGRLQSLQTYVTQQLIRAAEIRASANLAATKMSECVLGQSKRVDFCGKGYHLMSFPQSAPHGVVFLHVTYVPAQEKNFTTAPAICHDGKAHFPREGVFVSNGTHWFVTQRNFYEPQIITTDNTFVSGNCDVVIGIVNNTVYDPLQPELDSFKEELDKYFKNHTSPDVDLGDISGINASVVNIQKEIDRLNEVAKNLNESLIDLQELGKYEQGSGYIPEAPRDGQAYVRKDGEWVLLSTFLGRSLEVLFQGPGSLPETGGGSDYKDDDDKGGGGSGGGGSGGGGSGGGGSGGGGSHHHHHH

SEQ ID NO: 44 - protein, 1297 aa, Artificial Sequence
  SEQ ID NO:2 + A942P + D614N + T572I
MFVFLVLLPLVSSQCVNLTTRTQLPPAYTNSFTRGVYYPDKVFRSSVLHSTQDLFLPFFSNVTWFHAIHVSGTNGTKRFDNPVLPFNDGVYFASTEKSNIIRGWIFGTTLDSKTQSLLIVNNATNVVIKVCEFQFCNDPFLGVYYHKNNKSWMESEFRVYSSANNCTFEYVSQPFLMDLEGKQGNFKNLREFVFKNIDGYFKIYSKHTPINLVRDLPQGFSALEPLVDLPIGINITRFQTLLALHRSYLTPGDSSSGWTAGAAAYYVGYLQPRTFLLKYNENGTITDAVDCALDPLSETKCTLKSFTVEKGIYQTSNFRVQPTESIVRFPNITNLCPFGEVFNATRFASVYAWNRKRISNCVADYSVLYNSASFSTFKCYGVSPTKLNDLCFTNVYADSFVIRGDEVRQIAPGQTGKIADYNYKLPDDFTGCVIAWNSNNLDSKVGGNYNYLYRLFRKSNLKPFERDISTEIYQAGSTPCNGVEGFNCYFPLQSYGFQPTNGVGYQPYRVVVLSFELLHAPATVCGPKKSTNLVKNKCVNFNFNGLTGTGVLTESNKKFLPFQQFGRDIADITDAVRDPQTLEILDITPCSFGGVSVITPGTNTSNQVAVLYQNVNCTEVPVAIHADQLTPTWRVYSTGSNVFQTRAGCLIGAEHVNNSYECDIPIGAGICASYQTQTNSPSRAGSVASQSIIAYTMSLGAENSVAYSNNSIAIPTNFTISVTTEILPVSMTKTSVDCTMYICGDSTECSNLLLQYGSFCTQLNRALTGIAVEQDKNTQEVFAQVKQIYKTPPIKDFGGFNFSQILPDPSKPSKRSFIEDLLFNKVTLADAGFIKQYGDCLGDIAARDLICAQKFNGLTVLPPLLTDEMIAQYTSALLAGTITSGWTFGAGAALQIPFAMQMAYRFNGIGVTQNVLYENQKLIANQFNSAIGKIQDSLSSTPSALGKLQDVVNQNAQALNTLVKQLSSNFGAISSVLNDILSRLDKVEAEVQIDRLITGRLQSLQTYVTQQLIRAAEIRASANLAATKMSECVLGQSKRVDFCGKGYHLMSFPQSAPHGVVFLHVTYVPAQEKNFTTAPAICHDGKAHFPREGVFVSNGTHWFVTQRNFYEPQIITTDNTFVSGNCDVVIGIVNNTVYDPLQPELDSFKEELDKYFKNHTSPDVDLGDISGINASVVNIQKEIDRLNEVAKNLNESLIDLQELGKYEQGSGYIPEAPRDGQAYVRKDGEWVLLSTFLGRSLEVLFQGPGSLPETGGGSDYKDDDDKGGGGSGGGGSGGGGSGGGGSGGGGSHHHHHH

SEQ ID NO: 45 - protein, 1297 aa, Artificial Sequence
  SEQ ID NO:2 + A942P + D614N + N532P
MFVFLVLLPLVSSQCVNLTTRTQLPPAYTNSFTRGVYYPDKVFRSSVLHSTQDLFLPFFSNVTWFHAIHVSGTNGTKRFDNPVLPFNDGVYFASTEKSNIIRGWIFGTTLDSKTQSLLIVNNATNVVIKVCEFQFCNDPFLGVYYHKNNKSWMESEFRVYSSANNCTFEYVSQPFLMDLEGKQGNFKNLREFVFKNIDGYFKIYSKHTPINLVRDLPQGFSALEPLVDLPIGINITRFQTLLALHRSYLTPGDSSSGWTAGAAAYYVGYLQPRTFLLKYNENGTITDAVDCALDPLSETKCTLKSFTVEKGIYQTSNFRVQPTESIVRFPNITNLCPFGEVFNATRFASVYAWNRKRISNCVADYSVLYNSASFSTFKCYGVSPTKLNDLCFTNVYADSFVIRGDEVRQIAPGQTGKIADYNYKLPDDFTGCVIAWNSNNLDSKVGGNYNYLYRLFRKSNLKPFERDISTEIYQAGSTPCNGVEGFNCYFPLQSYGFQPTNGVGYQPYRVVVLSFELLHAPATVCGPKKSTPLVKNKCVNFNFNGLTGTGVLTESNKKFLPFQQFGRDIADTTDAVRDPQTLEILDITPCSFGGVSVITPGTNTSNQVAVLYQNVNCTEVPVAIHADQLTPTWRVYSTGSNVFQTRAGCLIGAEHVNNSYECDIPIGAGICASYQTQTNSPSRAGSVASQSIIAYTMSLGAENSVAYSNNSIAIPTNFTISVTTEILPVSMTKTSVDCTMYICGDSTECSNLLLQYGSFCTQLNRALTGIAVEQDKNTQEVFAQVKQIYKTPPIKDFGGFNFSQILPDPSKPSKRSFIEDLLFNKVTLADAGFIKQYGDCLGDIAARDLICAQKFNGLTVLPPLLTDEMIAQYTSALLAGTITSGWTFGAGAALQIPFAMQMAYRFNGIGVTQNVLYENQKLIANQFNSAIGKIQDSLSSTPSALGKLQDVVNQNAQALNTLVKQLSSNFGAISSVLNDILSRLDKVEAEVQIDRLITGRLQSLQTYVTQQLIRAAEIRASANLAATKMSECVLGQSKRVDFCGKGYHLMSFPQSAPHGVVFLHVTYVPAQEKNFTTAPAICHDGKAHFPREGVFVSNGTHWFVTQRNFYEPQIITTDNTFVSGNCDVVIGIVNNTVYDPLQPELDSFKEELDKYFKNHTSPDVDLGDISGINASVVNIQKEIDRLNEVAKNLNESLIDLQELGKYEQGSGYIPEAPRDGQAYVRKDGEWVLLSTFLGRSLEVLFQGPGSLPETGGGSDYKDDDDKGGGGSGGGGSGGGGSGGGGSGGGGSHHHHHH

SEQ ID NO: 46 - protein, 1297 aa, Artificial Sequence
  SEQ ID NO:2 + A942P + D614N + G880C + F888C
MFVFLVLLPLVSSQCVNLTTRTQLPPAYTNSFTRGVYYPDKVFRSSVLHSTQDLFLPFFSNVTWFHAIHVSGTNGTKRFDNPVLPFNDGVYFASTEKSNIIRGWIFGTTLDSKTQSLLIVNNATNVVIKVCEFQFCNDPFLGVYYHKNNKSWMESEFRVYSSANNCTFEYVSQPFLMDLEGKQGNFKNLREFVFKNIDGYFKIYSKHTPINLVRDLPQGFSALEPLVDLPIGINITRFQTLLALHRSYLTPGDSSSGWTAGAAAYYVGYLQPRTFLLKYNENGTITDAVDCALDPLSETKCTLKSFTVEKGIYQTSNFRVQPTESIVRFPNITNLCPFGEVFNATRFASVYAWNRKRISNCVADYSVLYNSASFSTFKCYGVSPTKLNDLCFTNVYADSFVIRGDEVRQIAPGQTGKIADYNYKLPDDFTGCVIAWNSNNLDSKVGGNYNYLYRLFRKSNLKPFERDISTEIYQAGSTPCNGVEGFNCYFPLQSYGFQPTNGVGYQPYRVVVLSFELLHAPATVCGPKKSTNLVKNKCVNFNFNGLTGTGVLTESNKKFLPFQQFGRDIADTTDAVRDPQTLEILDITPCSFGGVSVITPGTNTSNQVAVLYQNVNCTEVPVAIHADQLTPTWRVYSTGSNVFQTRAGCLIGAEHVNNSYECDIPIGAGICASYQTQTNSPSRAGSVASQSIIAYTMSLGAENSVAYSNNSIAIPTNFTISVTTEILPVSMTKTSVDCTMYICGDSTECSNLLLQYGSFCTQLNRALTGIAVEQDKNTQEVFAQVKQIYKTPPIKDFGGFNFSQILPDPSKPSKRSFIEDLLFNKVTLADAGFIKQYGDCLGDIAARDLICAQKFNGLTVLPPLLTDEMIAQYTSALLACTITSGWTCGAGAALQIPFAMQMAYRFNGIGVTQNVLYENQKLIANQFNSAIGKIQDSLSSTPSALGKLQDVVNQNAQALNTLVKQLSSNFGAISSVLNDILSRLDKVEAEVQIDRLITGRLQSLQTYVTQQLIRAAEIRASANLAATKMSECVLGQSKRVDFCGKGYHLMSFPQSAPHGVVFLHVTYVPAQEKNFTTAPAICHDGKAHFPREGVFVSNGTHWFVTQRNFYEPQIITTDNTFVSGNCDVVIGIVNNTVYDPLQPELDSFKEELDKYFKNHTSPDVDLGDISGINASVVNIQKEIDRLNEVAKNLNESLIDLQELGKYEQGSGYIPEAPRDGQAYVRKDGEWVLLSTFLGRSLEVLFQGPGSLPETGGGSDYKDDDDKGGGGSGGGGSGGGGSGGGGSGGGGSHHHHHH

SEQ ID NO: 47 - protein, 1297 aa, Artificial Sequence
  SEQ ID NO:2 + A942P + D614N + S884C + A893C
MFVFLVLLPLVSSQCVNLTTRTQLPPAYTNSFTRGVYYPDKVFRSSVLHSTQDLFLPFFSNVTWFHAIHVSGTNGTKRFDNPVLPFNDGVYFASTEKSNIIRGWIFGTTLDSKTQSLLIVNNATNVVIKVCEFQFCNDPFLGVYYHKNNKSWMESEFRVYSSANNCTFEYVSQPFLMDLEGKQGNFKNLREFVFKNIDGYFKIYSKHTPINLVRDLPQGFSALEPLVDLPIGINITRFQTLLALHRSYLTPGDSSSGWTAGAAAYYVGYLQPRTFLLKYNENGTITDAVDCALDPLSETKCTLKSFTVEKGIYQTSNFRVQPTESIVRFPNITNLCPFGEVFNATRFASVYAWNRKRISNCVADYSVLYNSASFSTFKCYGVSPTKLNDLCFTNVYADSFVIRGDEVRQIAPGQTGKIADYNYKLPDDFTGCVIAWNSNNLDSKVGGNYNYLYRLFRKSNLKPFERDISTEIYQAGSTPCNGVEGFNCYFPLQSYGFQPTNGVGYQPYRVVVLSFELLHAPATVCGPKKSTNLVKNKCVNFNFNGLTGTGVLTESNKKFLPFQQFGRDIADTTDAVRDPQTLEILDITPCSFGGVSVITPGTNTSNQVAVLYQNVNCTEVPVAIHADQLTPTWRVYSTGSNVFQTRAGCLIGAEHVNNSYECDIPIGAGICASYQTQTNSPSRAGSVASQSIIAYTMSLGAENSVAYSNNSIAIPTNFTISVTTEILPVSMTKTSVDCTMYICGDSTECSNLLLQYGSFCTQLNRALTGIAVEQDKNTQEVFAQVKQIYKTPPIKDFGGFNFSQILPDPSKPSKRSFIEDLLFNKVTLADAGFIKQYGDCLGDIAARDLICAQKFNGLTVLPPLLTDEMIAQYTSALLAGTITCGWTFGAGACLQIPFAMQMAYRFNGIGVTQNVLYENQKLIANQFNSAIGKIQDSLSSTPSALGKLQDVVNQNAQALNTLVKQLSSNFGAISSVLNDILSRLDKVEAEVQIDRLITGRLQSLQTYVTQQLIRAAEIRASANLAATKMSECVLGQSKRVDFCGKGYHLMSFPQSAPHGVVFLHVTYVPAQEKNFTTAPAICHDGKAHFPREGVFVSNGTHWFVTQRNFYEPQIITTDNTFVSGNCDVVIGIVNNTVYDPLQPELDSFKEELDKYFKNHTSPDVDLGDISGINASVVNIQKEIDRLNEVAKNLNESLIDLQELGKYEQGSGYIPEAPRDGQAYVRKDGEWVLLSTFLGRSLEVLFQGPGSLPETGGGSDYKDDDDKGGGGSGGGGSGGGGSGGGGSGGGGSHHHHHH

SEQ ID NO: 48 - protein, 1297 aa, Artificial Sequence
  SEQ ID NO:2 + A942P + T572I + N532P
MFVFLVLLPLVSSQCVNLTTRTQLPPAYTNSFTRGVYYPDKVFRSSVLHSTQDLFLPFFSNVTWFHAIHVSGTNGTKRFDNPVLPFNDGVYFASTEKSNIIRGWIFGTTLDSKTQSLLIVNNATNVVIKVCEFQFCNDPFLGVYYHKNNKSWMESEFRVYSSANNCTFEYVSQPFLMDLEGKQGNFKNLREFVFKNIDGYFKIYSKHTPINLVRDLPQGFSALEPLVDLPIGINITRFQTLLALHRSYLTPGDSSSGWTAGAAAYYVGYLQPRTFLLKYNENGTITDAVDCALDPLSETKCTLKSFTVEKGIYQTSNFRVQPTESIVRFPNITNLCPFGEVFNATRFASVYAWNRKRISNCVADYSVLYNSASFSTFKCYGVSPTKLNDLCFTNVYADSFVIRGDEVRQIAPGQTGKIADYNYKLPDDFTGCVIAWNSNNLDSKVGGNYNYLYRLFRKSNLKPFERDISTEIYQAGSTPCNGVEGFNCYFPLQSYGFQPTNGVGYQPYRVVVLSFELLHAPATVCGPKKSTPLVKNKCVNFNFNGLTGTGVLTESNKKFLPFQQFGRDIADITDAVRDPQTLEILDITPCSFGGVSVITPGTNTSNQVAVLYQDVNCTEVPVAIHADQLTPTWRVYSTGSNVFQTRAGCLIGAEHVNNSYECDIPIGAGICASYQTQTNSPSRAGSVASQSIIAYTMSLGAENSVAYSNNSIAIPTNFTISVTTEILPVSMTKTSVDCTMYICGDSTECSNLLLQYGSFCTQLNRALTGIAVEQDKNTQEVFAQVKQIYKTPPIKDFGGFNFSQILPDPSKPSKRSFIEDLLFNKVTLADAGFIKQYGDCLGDIAARDLICAQKFNGLTVLPPLLTDEMIAQYTSALLAGTITSGWTFGAGAALQIPFAMQMAYRFNGIGVTQNVLYENQKLIANQFNSAIGKIQDSLSSTPSALGKLQDVVNQNAQALNTLVKQLSSNFGAISSVLNDILSRLDKVEAEVQIDRLITGRLQSLQTYVTQQLIRAAEIRASANLAATKMSECVLGQSKRVDFCGKGYHLMSFPQSAPHGVVFLHVTYVPAQEKNFTTAPAICHDGKAHFPREGVFVSNGTHWFVTQRNFYEPQIITTDNTFVSGNCDVVIGIVNNTVYDPLQPELDSFKEELDKYFKNHTSPDVDLGDISGINASVVNIQKEIDRLNEVAKNLNESLIDLQELGKYEQGSGYIPEAPRDGQAYVRKDGEWVLLSTFLGRSLEVLFQGPGSLPETGGGSDYKDDDDKGGGGSGGGGSGGGGSGGGGSGGGGSHHHHHH

SEQ ID NO: 49 - protein, 1297 aa, Artificial Sequence
  SEQ ID NO:2 + A942P + T572I + G880C + F888C
MFVFLVLLPLVSSQCVNLTTRTQLPPAYTNSFTRGVYYPDKVFRSSVLHSTQDLFLPFFSNVTWFHAIHVSGTNGTKRFDNPVLPFNDGVYFASTEKSNIIRGWIFGTTLDSKTQSLLIVNNATNVVIKVCEFQFCNDPFLGVYYHKNNKSWMESEFRVYSSANNCTFEYVSQPFLMDLEGKQGNFKNLREFVFKNIDGYFKIYSKHTPINLVRDLPQGFSALEPLVDLPIGINITRFQTLLALHRSYLTPGDSSSGWTAGAAAYYVGYLQPRTFLLKYNENGTITDAVDCALDPLSETKCTLKSFTVEKGIYQTSNFRVQPTESIVRFPNITNLCPFGEVFNATRFASVYAWNRKRISNCVADYSVLYNSASFSTFKCYGVSPTKLNDLCFTNVYADSFVIRGDEVRQIAPGQTGKIADYNYKLPDDFTGCVIAWNSNNLDSKVGGNYNYLYRLFRKSNLKPFERDISTEIYQAGSTPCNGVEGFNCYFPLQSYGFQPTNGVGYQPYRVVVLSFELLHAPATVCGPKKSTNLVKNKCVNFNFNGLTGTGVLTESNKKFLPFQQFGRDIADITDAVRDPQTLEILDITPCSFGGVSVITPGTNTSNQVAVLYQDVNCTEVPVAIHADQLTPTWRVYSTGSNVFQTRAGCLIGAEHVNNSYECDIPIGAGICASYQTQTNSPSRAGSVASQSIIAYTMSLGAENSVAYSNNSIAIPTNFTISVTTEILPVSMTKTSVDCTMYICGDSTECSNLLLQYGSFCTQLNRALTGIAVEQDKNTQEVFAQVKQIYKTPPIKDFGGFNFSQILPDPSKPSKRSFIEDLLFNKVTLADAGFIKQYGDCLGDIAARDLICAQKFNGLTVLPPLLTDEMIAQYTSALLACTITSGWTCGAGAALQIPFAMQMAYRFNGIGVTQNVLYENQKLIANQFNSAIGKIQDSLSSTPSALGKLQDVVNQNAQALNTLVKQLSSNFGAISSVLNDILSRLDKVEAEVQIDRLITGRLQSLQTYVTQQLIRAAEIRASANLAATKMSECVLGQSKRVDFCGKGYHLMSFPQSAPHGVVFLHVTYVPAQEKNFTTAPAICHDGKAHFPREGVFVSNGTHWFVTQRNFYEPQIITTDNTFVSGNCDVVIGIVNNTVYDPLQPELDSFKEELDKYFKNHTSPDVDLGDISGINASVVNIQKEIDRLNEVAKNLNESLIDLQELGKYEQGSGYIPEAPRDGQAYVRKDGEWVLLSTFLGRSLEVLFQGPGSLPETGGGSDYKDDDDKGGGGSGGGGSGGGGSGGGGSGGGGSHHHHHH

SEQ ID NO: 50 - protein, 1297 aa, Artificial Sequence
  SEQ ID NO:2 + A942P + T572I + S884C + A893C
MFVFLVLLPLVSSQCVNLTTRTQLPPAYTNSFTRGVYYPDKVFRSSVLHSTQDLFLPFFSNVTWFHAIHVSGTNGTKRFDNPVLPFNDGVYFASTEKSNIIRGWIFGTTLDSKTQSLLIVNNATNVVIKVCEFQFCNDPFLGVYYHKNNKSWMESEFRVYSSANNCTFEYVSQPFLMDLEGKQGNFKNLREFVFKNIDGYFKIYSKHTPINLVRDLPQGFSALEPLVDLPIGINITRFQTLLALHRSYLTPGDSSSGWTAGAAAYYVGYLQPRTFLLKYNENGTITDAVDCALDPLSETKCTLKSFTVEKGIYQTSNFRVQPTESIVRFPNITNLCPFGEVFNATRFASVYAWNRKRISNCVADYSVLYNSASFSTFKCYGVSPTKLNDLCFTNVYADSFVIRGDEVRQIAPGQTGKIADYNYKLPDDFTGCVIAWNSNNLDSKVGGNYNYLYRLFRKSNLKPFERDISTEIYQAGSTPCNGVEGFNCYFPLQSYGFQPTNGVGYQPYRVVVLSFELLHAPATVCGPKKSTNLVKNKCVNFNFNGLTGTGVLTESNKKFLPFQQFGRDIADITDAVRDPQTLEILDITPCSFGGVSVITPGTNTSNQVAVLYQDVNCTEVPVAIHADQLTPTWRVYSTGSNVFQTRAGCLIGAEHVNNSYECDIPIGAGICASYQTQTNSPSRAGSVASQSIIAYTMSLGAENSVAYSNNSIAIPTNFTISVTTEILPVSMTKTSVDCTMYICGDSTECSNLLLQYGSFCTQLNRALTGIAVEQDKNTQEVFAQVKQIYKTPPIKDFGGFNFSQILPDPSKPSKRSFIEDLLFNKVTLADAGFIKQYGDCLGDIAARDLICAQKFNGLTVLPPLLTDEMIAQYTSALLAGTITCGWTFGAGACLQIPFAMQMAYRFNGIGVTQNVLYENQKLIANQFNSAIGKIQDSLSSTPSALGKLQDVVNQNAQALNTLVKQLSSNFGAISSVLNDILSRLDKVEAEVQIDRLITGRLQSLQTYVTQQLIRAAEIRASANLAATKMSECVLGQSKRVDFCGKGYHLMSFPQSAPHGVVFLHVTYVPAQEKNFTTAPAICHDGKAHFPREGVFVSNGTHWFVTQRNFYEPQIITTDNTFVSGNCDVVIGIVNNTVYDPLQPELDSFKEELDKYFKNHTSPDVDLGDISGINASVVNIQKEIDRLNEVAKNLNESLIDLQELGKYEQGSGYIPEAPRDGQAYVRKDGEWVLLSTFLGRSLEVLFQGPGSLPETGGGSDYKDDDDKGGGGSGGGGSGGGGSGGGGSGGGGSHHHHHH

SEQ ID NO: 51 - protein, 1297 aa, Artificial Sequence
  SEQ ID NO:2 + A942P + N532P + G880C + F888C
MFVFLVLLPLVSSQCVNLTTRTQLPPAYTNSFTRGVYYPDKVFRSSVLHSTQDLFLPFFSNVTWFHAIHVSGTNGTKRFDNPVLPFNDGVYFASTEKSNIIRGWIFGTTLDSKTQSLLIVNNATNVVIKVCEFQFCNDPFLGVYYHKNNKSWMESEFRVYSSANNCTFEYVSQPFLMDLEGKQGNFKNLREFVFKNIDGYFKIYSKHTPINLVRDLPQGFSALEPLVDLPIGINITRFQTLLALHRSYLTPGDSSSGWTAGAAAYYVGYLQPRTFLLKYNENGTITDAVDCALDPLSETKCTLKSFTVEKGIYQTSNFRVQPTESIVRFPNITNLCPFGEVFNATRFASVYAWNRKRISNCVADYSVLYNSASFSTFKCYGVSPTKLNDLCFTNVYADSFVIRGDEVRQIAPGQTGKIADYNYKLPDDFTGCVIAWNSNNLDSKVGGNYNYLYRLFRKSNLKPFERDISTEIYQAGSTPCNGVEGFNCYFPLQSYGFQPTNGVGYQPYRVVVLSFELLHAPATVCGPKKSTPLVKNKCVNFNFNGLTGTGVLTESNKKFLPFQQFGRDIADTTDAVRDPQTLEILDITPCSFGGVSVITPGTNTSNQVAVLYQDVNCTEVPVAIHADQLTPTWRVYSTGSNVFQTRAGCLIGAEHVNNSYECDIPIGAGICASYQTQTNSPSRAGSVASQSIIAYTMSLGAENSVAYSNNSIAIPTNFTISVTTEILPVSMTKTSVDCTMYICGDSTECSNLLLQYGSFCTQLNRALTGIAVEQDKNTQEVFAQVKQIYKTPPIKDFGGFNFSQILPDPSKPSKRSFIEDLLFNKVTLADAGFIKQYGDCLGDIAARDLICAQKFNGLTVLPPLLTDEMIAQYTSALLACTITSGWTCGAGAALQIPFAMQMAYRFNGIGVTQNVLYENQKLIANQFNSAIGKIQDSLSSTPSALGKLQDVVNQNAQALNTLVKQLSSNFGAISSVLNDILSRLDKVEAEVQIDRLITGRLQSLQTYVTQQLIRAAEIRASANLAATKMSECVLGQSKRVDFCGKGYHLMSFPQSAPHGVVFLHVTYVPAQEKNFTTAPAICHDGKAHFPREGVFVSNGTHWFVTQRNFYEPQIITTDNTFVSGNCDVVIGIVNNTVYDPLQPELDSFKEELDKYFKNHTSPDVDLGDISGINASVVNIQKEIDRLNEVAKNLNESLIDLQELGKYEQGSGYIPEAPRDGQAYVRKDGEWVLLSTFLGRSLEVLFQGPGSLPETGGGSDYKDDDDKGGGGSGGGGSGGGGSGGGGSGGGGSHHHHHH

SEQ ID NO: 52 - protein, 1297 aa, Artificial Sequence
  SEQ ID NO:2 + A942P + T532P + S884C + A893C
MFVFLVLLPLVSSQCVNLTTRTQLPPAYTNSFTRGVYYPDKVFRSSVLHSTQDLFLPFFSNVTWFHAIHVSGTNGTKRFDNPVLPFNDGVYFASTEKSNIIRGWIFGTTLDSKTQSLLIVNNATNVVIKVCEFQFCNDPFLGVYYHKNNKSWMESEFRVYSSANNCTFEYVSQPFLMDLEGKQGNFKNLREFVFKNIDGYFKIYSKHTPINLVRDLPQGFSALEPLVDLPIGINITRFQTLLALHRSYLTPGDSSSGWTAGAAAYYVGYLQPRTFLLKYNENGTITDAVDCALDPLSETKCTLKSFTVEKGIYQTSNFRVQPTESIVRFPNITNLCPFGEVFNATRFASVYAWNRKRISNCVADYSVLYNSASFSTFKCYGVSPTKLNDLCFTNVYADSFVIRGDEVRQIAPGQTGKIADYNYKLPDDFTGCVIAWNSNNLDSKVGGNYNYLYRLFRKSNLKPFERDISTEIYQAGSTPCNGVEGFNCYFPLQSYGFQPTNGVGYQPYRVVVLSFELLHAPATVCGPKKSTPLVKNKCVNFNFNGLTGTGVLTESNKKFLPFQQFGRDIADTTDAVRDPQTLEILDITPCSFGGVSVITPGTNTSNQVAVLYQDVNCTEVPVAIHADQLTPTWRVYSTGSNVFQTRAGCLIGAEHVNNSYECDIPIGAGICASYQTQTNSPSRAGSVASQSIIAYTMSLGAENSVAYSNNSIAIPTNFTISVTTEILPVSMTKTSVDCTMYICGDSTECSNLLLQYGSFCTQLNRALTGIAVEQDKNTQEVFAQVKQIYKTPPIKDFGGFNFSQILPDPSKPSKRSFIEDLLFNKVTLADAGFIKQYGDCLGDIAARDLICAQKFNGLTVLPPLLTDEMIAQYTSALLAGTITCGWTFGAGACLQIPFAMQMAYRFNGIGVTQNVLYENQKLIANQFNSAIGKIQDSLSSTPSALGKLQDVVNQNAQALNTLVKQLSSNFGAISSVLNDILSRLDKVEAEVQIDRLITGRLQSLQTYVTQQLIRAAEIRASANLAATKMSECVLGQSKRVDFCGKGYHLMSFPQSAPHGVVFLHVTYVPAQEKNFTTAPAICHDGKAHFPREGVFVSNGTHWFVTQRNFYEPQIITTDNTFVSGNCDVVIGIVNNTVYDPLQPELDSFKEELDKYFKNHTSPDVDLGDISGINASVVNIQKEIDRLNEVAKNLNESLIDLQELGKYEQGSGYIPEAPRDGQAYVRKDGEWVLLSTFLGRSLEVLFQGPGSLPETGGGSDYKDDDDKGGGGSGGGGSGGGGSGGGGSGGGGSHHHHHH

SEQ ID NO: 53 - protein, 1297 aa, Artificial Sequence
  SEQ ID NO:2 + A892P + D614N + T572I
MFVFLVLLPLVSSQCVNLTTRTQLPPAYTNSFTRGVYYPDKVFRSSVLHSTQDLFLPFFSNVTWFHAIHVSGTNGTKRFDNPVLPFNDGVYFASTEKSNIIRGWIFGTTLDSKTQSLLIVNNATNVVIKVCEFQFCNDPFLGVYYHKNNKSWMESEFRVYSSANNCTFEYVSQPFLMDLEGKQGNFKNLREFVFKNIDGYFKIYSKHTPINLVRDLPQGFSALEPLVDLPIGINITRFQTLLALHRSYLTPGDSSSGWTAGAAAYYVGYLQPRTFLLKYNENGTITDAVDCALDPLSETKCTLKSFTVEKGIYQTSNFRVQPTESIVRFPNITNLCPFGEVFNATRFASVYAWNRKRISNCVADYSVLYNSASFSTFKCYGVSPTKLNDLCFTNVYADSFVIRGDEVRQIAPGQTGKIADYNYKLPDDFTGCVIAWNSNNLDSKVGGNYNYLYRLFRKSNLKPFERDISTEIYQAGSTPCNGVEGFNCYFPLQSYGFQPTNGVGYQPYRVVVLSFELLHAPATVCGPKKSTNLVKNKCVNFNFNGLTGTGVLTESNKKFLPFQQFGRDIADITDAVRDPQTLEILDITPCSFGGVSVITPGTNTSNQVAVLYQNVNCTEVPVAIHADQLTPTWRVYSTGSNVFQTRAGCLIGAEHVNNSYECDIPIGAGICASYQTQTNSPSRAGSVASQSIIAYTMSLGAENSVAYSNNSIAIPTNFTISVTTEILPVSMTKTSVDCTMYICGDSTECSNLLLQYGSFCTQLNRALTGIAVEQDKNTQEVFAQVKQIYKTPPIKDFGGFNFSQILPDPSKPSKRSFIEDLLFNKVTLADAGFIKQYGDCLGDIAARDLICAQKFNGLTVLPPLLTDEMIAQYTSALLAGTITSGWTFGAGPALQIPFAMQMAYRFNGIGVTQNVLYENQKLIANQFNSAIGKIQDSLSSTASALGKLQDVVNQNAQALNTLVKQLSSNFGAISSVLNDILSRLDKVEAEVQIDRLITGRLQSLQTYVTQQLIRAAEIRASANLAATKMSECVLGQSKRVDFCGKGYHLMSFPQSAPHGVVFLHVTYVPAQEKNFTTAPAICHDGKAHFPREGVFVSNGTHWFVTQRNFYEPQIITTDNTFVSGNCDVVIGIVNNTVYDPLQPELDSFKEELDKYFKNHTSPDVDLGDISGINASVVNIQKEIDRLNEVAKNLNESLIDLQELGKYEQGSGYIPEAPRDGQAYVRKDGEWVLLSTFLGRSLEVLFQGPGSLPETGGGSDYKDDDDKGGGGSGGGGSGGGGSGGGGSGGGGSHHHHHH

SEQ ID NO: 54 - protein, 1297 aa, Artificial Sequence
  SEQ ID NO:2 + A892P + D614N + N532P
MFVFLVLLPLVSSQCVNLTTRTQLPPAYTNSFTRGVYYPDKVFRSSVLHSTQDLFLPFFSNVTWFHAIHVSGTNGTKRFDNPVLPFNDGVYFASTEKSNIIRGWIFGTTLDSKTQSLLIVNNATNVVIKVCEFQFCNDPFLGVYYHKNNKSWMESEFRVYSSANNCTFEYVSQPFLMDLEGKQGNFKNLREFVFKNIDGYFKIYSKHTPINLVRDLPQGFSALEPLVDLPIGINITRFQTLLALHRSYLTPGDSSSGWTAGAAAYYVGYLQPRTFLLKYNENGTITDAVDCALDPLSETKCTLKSFTVEKGIYQTSNFRVQPTESIVRFPNITNLCPFGEVFNATRFASVYAWNRKRISNCVADYSVLYNSASFSTFKCYGVSPTKLNDLCFTNVYADSFVIRGDEVRQIAPGQTGKIADYNYKLPDDFTGCVIAWNSNNLDSKVGGNYNYLYRLFRKSNLKPFERDISTEIYQAGSTPCNGVEGFNCYFPLQSYGFQPTNGVGYQPYRVVVLSFELLHAPATVCGPKKSTPLVKNKCVNFNFNGLTGTGVLTESNKKFLPFQQFGRDIADTTDAVRDPQTLEILDITPCSFGGVSVITPGTNTSNQVAVLYQNVNCTEVPVAIHADQLTPTWRVYSTGSNVFQTRAGCLIGAEHVNNSYECDIPIGAGICASYQTQTNSPSRAGSVASQSIIAYTMSLGAENSVAYSNNSIAIPTNFTISVTTEILPVSMTKTSVDCTMYICGDSTECSNLLLQYGSFCTQLNRALTGIAVEQDKNTQEVFAQVKQIYKTPPIKDFGGFNFSQILPDPSKPSKRSFIEDLLFNKVTLADAGFIKQYGDCLGDIAARDLICAQKFNGLTVLPPLLTDEMIAQYTSALLAGTITSGWTFGAGPALQIPFAMQMAYRFNGIGVTQNVLYENQKLIANQFNSAIGKIQDSLSSTASALGKLQDVVNQNAQALNTLVKQLSSNFGAISSVLNDILSRLDKVEAEVQIDRLITGRLQSLQTYVTQQLIRAAEIRASANLAATKMSECVLGQSKRVDFCGKGYHLMSFPQSAPHGVVFLHVTYVPAQEKNFTTAPAICHDGKAHFPREGVFVSNGTHWFVTQRNFYEPQIITTDNTFVSGNCDVVIGIVNNTVYDPLQPELDSFKEELDKYFKNHTSPDVDLGDISGINASVVNIQKEIDRLNEVAKNLNESLIDLQELGKYEQGSGYIPEAPRDGQAYVRKDGEWVLLSTFLGRSLEVLFQGPGSLPETGGGSDYKDDDDKGGGGSGGGGSGGGGSGGGGSGGGGSHHHHHH

SEQ ID NO: 55 - protein, 1297 aa, Artificial Sequence
  SEQ ID NO:2 + A892P + D614N + G880C + F888C
MFVFLVLLPLVSSQCVNLTTRTQLPPAYTNSFTRGVYYPDKVFRSSVLHSTQDLFLPFFSNVTWFHAIHVSGTNGTKRFDNPVLPFNDGVYFASTEKSNIIRGWIFGTTLDSKTQSLLIVNNATNVVIKVCEFQFCNDPFLGVYYHKNNKSWMESEFRVYSSANNCTFEYVSQPFLMDLEGKQGNFKNLREFVFKNIDGYFKIYSKHTPINLVRDLPQGFSALEPLVDLPIGINITRFQTLLALHRSYLTPGDSSSGWTAGAAAYYVGYLQPRTFLLKYNENGTITDAVDCALDPLSETKCTLKSFTVEKGIYQTSNFRVQPTESIVRFPNITNLCPFGEVFNATRFASVYAWNRKRISNCVADYSVLYNSASFSTFKCYGVSPTKLNDLCFTNVYADSFVIRGDEVRQIAPGQTGKIADYNYKLPDDFTGCVIAWNSNNLDSKVGGNYNYLYRLFRKSNLKPFERDISTEIYQAGSTPCNGVEGFNCYFPLQSYGFQPTNGVGYQPYRVVVLSFELLHAPATVCGPKKSTNLVKNKCVNFNFNGLTGTGVLTESNKKFLPFQQFGRDIADTTDAVRDPQTLEILDITPCSFGGVSVITPGTNTSNQVAVLYQNVNCTEVPVAIHADQLTPTWRVYSTGSNVFQTRAGCLIGAEHVNNSYECDIPIGAGICASYQTQTNSPSRAGSVASQSIIAYTMSLGAENSVAYSNNSIAIPTNFTISVTTEILPVSMTKTSVDCTMYICGDSTECSNLLLQYGSFCTQLNRALTGIAVEQDKNTQEVFAQVKQIYKTPPIKDFGGFNFSQILPDPSKPSKRSFIEDLLFNKVTLADAGFIKQYGDCLGDIAARDLICAQKFNGLTVLPPLLTDEMIAQYTSALLACTITSGWTCGAGPALQIPFAMQMAYRFNGIGVTQNVLYENQKLIANQFNSAIGKIQDSLSSTASALGKLQDVVNQNAQALNTLVKQLSSNFGAISSVLNDILSRLDKVEAEVQIDRLITGRLQSLQTYVTQQLIRAAEIRASANLAATKMSECVLGQSKRVDFCGKGYHLMSFPQSAPHGVVFLHVTYVPAQEKNFTTAPAICHDGKAHFPREGVFVSNGTHWFVTQRNFYEPQIITTDNTFVSGNCDVVIGIVNNTVYDPLQPELDSFKEELDKYFKNHTSPDVDLGDISGINASVVNIQKEIDRLNEVAKNLNESLIDLQELGKYEQGSGYIPEAPRDGQAYVRKDGEWVLLSTFLGRSLEVLFQGPGSLPETGGGSDYKDDDDKGGGGSGGGGSGGGGSGGGGSGGGGSHHHHHH

SEQ ID NO: 56 - protein, 1297 aa, Artificial Sequence
  SEQ ID NO:2 + A892P + D614N + S884C + A893C
MFVFLVLLPLVSSQCVNLTTRTQLPPAYTNSFTRGVYYPDKVFRSSVLHSTQDLFLPFFSNVTWFHAIHVSGTNGTKRFDNPVLPFNDGVYFASTEKSNIIRGWIFGTTLDSKTQSLLIVNNATNVVIKVCEFQFCNDPFLGVYYHKNNKSWMESEFRVYSSANNCTFEYVSQPFLMDLEGKQGNFKNLREFVFKNIDGYFKIYSKHTPINLVRDLPQGFSALEPLVDLPIGINITRFQTLLALHRSYLTPGDSSSGWTAGAAAYYVGYLQPRTFLLKYNENGTITDAVDCALDPLSETKCTLKSFTVEKGIYQTSNFRVQPTESIVRFPNITNLCPFGEVFNATRFASVYAWNRKRISNCVADYSVLYNSASFSTFKCYGVSPTKLNDLCFTNVYADSFVIRGDEVRQIAPGQTGKIADYNYKLPDDFTGCVIAWNSNNLDSKVGGNYNYLYRLFRKSNLKPFERDISTEIYQAGSTPCNGVEGFNCYFPLQSYGFQPTNGVGYQPYRVVVLSFELLHAPATVCGPKKSTNLVKNKCVNFNFNGLTGTGVLTESNKKFLPFQQFGRDIADTTDAVRDPQTLEILDITPCSFGGVSVITPGTNTSNQVAVLYQNVNCTEVPVAIHADQLTPTWRVYSTGSNVFQTRAGCLIGAEHVNNSYECDIPIGAGICASYQTQTNSPSRAGSVASQSIIAYTMSLGAENSVAYSNNSIAIPTNFTISVTTEILPVSMTKTSVDCTMYICGDSTECSNLLLQYGSFCTQLNRALTGIAVEQDKNTQEVFAQVKQIYKTPPIKDFGGFNFSQILPDPSKPSKRSFIEDLLFNKVTLADAGFIKQYGDCLGDIAARDLICAQKFNGLTVLPPLLTDEMIAQYTSALLAGTITCGWTFGAGPCLQIPFAMQMAYRFNGIGVTQNVLYENQKLIANQFNSAIGKIQDSLSSTASALGKLQDVVNQNAQALNTLVKQLSSNFGAISSVLNDILSRLDKVEAEVQIDRLITGRLQSLQTYVTQQLIRAAEIRASANLAATKMSECVLGQSKRVDFCGKGYHLMSFPQSAPHGVVFLHVTYVPAQEKNFTTAPAICHDGKAHFPREGVFVSNGTHWFVTQRNFYEPQIITTDNTFVSGNCDVVIGIVNNTVYDPLQPELDSFKEELDKYFKNHTSPDVDLGDISGINASVVNIQKEIDRLNEVAKNLNESLIDLQELGKYEQGSGYIPEAPRDGQAYVRKDGEWVLLSTFLGRSLEVLFQGPGSLPETGGGSDYKDDDDKGGGGSGGGGSGGGGSGGGGSGGGGSHHHHHH

SEQ ID NO: 57 - protein, 1297 aa, Artificial Sequence
  SEQ ID NO:2 + A892P + T572I + N532P
MFVFLVLLPLVSSQCVNLTTRTQLPPAYTNSFTRGVYYPDKVFRSSVLHSTQDLFLPFFSNVTWFHAIHVSGTNGTKRFDNPVLPFNDGVYFASTEKSNIIRGWIFGTTLDSKTQSLLIVNNATNVVIKVCEFQFCNDPFLGVYYHKNNKSWMESEFRVYSSANNCTFEYVSQPFLMDLEGKQGNFKNLREFVFKNIDGYFKIYSKHTPINLVRDLPQGFSALEPLVDLPIGINITRFQTLLALHRSYLTPGDSSSGWTAGAAAYYVGYLQPRTFLLKYNENGTITDAVDCALDPLSETKCTLKSFTVEKGIYQTSNFRVQPTESIVRFPNITNLCPFGEVFNATRFASVYAWNRKRISNCVADYSVLYNSASFSTFKCYGVSPTKLNDLCFTNVYADSFVIRGDEVRQIAPGQTGKIADYNYKLPDDFTGCVIAWNSNNLDSKVGGNYNYLYRLFRKSNLKPFERDISTEIYQAGSTPCNGVEGFNCYFPLQSYGFQPTNGVGYQPYRVVVLSFELLHAPATVCGPKKSTPLVKNKCVNFNFNGLTGTGVLTESNKKFLPFQQFGRDIADITDAVRDPQTLEILDITPCSFGGVSVITPGTNTSNQVAVLYQDVNCTEVPVAIHADQLTPTWRVYSTGSNVFQTRAGCLIGAEHVNNSYECDIPIGAGICASYQTQTNSPSRAGSVASQSIIAYTMSLGAENSVAYSNNSIAIPTNFTISVTTEILPVSMTKTSVDCTMYICGDSTECSNLLLQYGSFCTQLNRALTGIAVEQDKNTQEVFAQVKQIYKTPPIKDFGGFNFSQILPDPSKPSKRSFIEDLLFNKVTLADAGFIKQYGDCLGDIAARDLICAQKFNGLTVLPPLLTDEMIAQYTSALLAGTITSGWTFGAGPALQIPFAMQMAYRFNGIGVTQNVLYENQKLIANQFNSAIGKIQDSLSSTASALGKLQDVVNQNAQALNTLVKQLSSNFGAISSVLNDILSRLDKVEAEVQIDRLITGRLQSLQTYVTQQLIRAAEIRASANLAATKMSECVLGQSKRVDFCGKGYHLMSFPQSAPHGVVFLHVTYVPAQEKNFTTAPAICHDGKAHFPREGVFVSNGTHWFVTQRNFYEPQIITTDNTFVSGNCDVVIGIVNNTVYDPLQPELDSFKEELDKYFKNHTSPDVDLGDISGINASVVNIQKEIDRLNEVAKNLNESLIDLQELGKYEQGSGYIPEAPRDGQAYVRKDGEWVLLSTFLGRSLEVLFQGPGSLPETGGGSDYKDDDDKGGGGSGGGGSGGGGSGGGGSGGGGSHHHHHH

SEQ ID NO: 58 - protein, 1297 aa, Artificial Sequence
  SEQ ID NO:2 + A892P + T572I + G880C + F888C
MFVFLVLLPLVSSQCVNLTTRTQLPPAYTNSFTRGVYYPDKVFRSSVLHSTQDLFLPFFSNVTWFHAIHVSGTNGTKRFDNPVLPFNDGVYFASTEKSNIIRGWIFGTTLDSKTQSLLIVNNATNVVIKVCEFQFCNDPFLGVYYHKNNKSWMESEFRVYSSANNCTFEYVSQPFLMDLEGKQGNFKNLREFVFKNIDGYFKIYSKHTPINLVRDLPQGFSALEPLVDLPIGINITRFQTLLALHRSYLTPGDSSSGWTAGAAAYYVGYLQPRTFLLKYNENGTITDAVDCALDPLSETKCTLKSFTVEKGIYQTSNFRVQPTESIVRFPNITNLCPFGEVFNATRFASVYAWNRKRISNCVADYSVLYNSASFSTFKCYGVSPTKLNDLCFTNVYADSFVIRGDEVRQIAPGQTGKIADYNYKLPDDFTGCVIAWNSNNLDSKVGGNYNYLYRLFRKSNLKPFERDISTEIYQAGSTPCNGVEGFNCYFPLQSYGFQPTNGVGYQPYRVVVLSFELLHAPATVCGPKKSTNLVKNKCVNFNFNGLTGTGVLTESNKKFLPFQQFGRDIADITDAVRDPQTLEILDITPCSFGGVSVITPGTNTSNQVAVLYQDVNCTEVPVAIHADQLTPTWRVYSTGSNVFQTRAGCLIGAEHVNNSYECDIPIGAGICASYQTQTNSPSRAGSVASQSIIAYTMSLGAENSVAYSNNSIAIPTNFTISVTTEILPVSMTKTSVDCTMYICGDSTECSNLLLQYGSFCTQLNRALTGIAVEQDKNTQEVFAQVKQIYKTPPIKDFGGFNFSQILPDPSKPSKRSFIEDLLFNKVTLADAGFIKQYGDCLGDIAARDLICAQKFNGLTVLPPLLTDEMIAQYTSALLACTITSGWTCGAGPALQIPFAMQMAYRFNGIGVTQNVLYENQKLIANQFNSAIGKIQDSLSSTASALGKLQDVVNQNAQALNTLVKQLSSNFGAISSVLNDILSRLDKVEAEVQIDRLITGRLQSLQTYVTQQLIRAAEIRASANLAATKMSECVLGQSKRVDFCGKGYHLMSFPQSAPHGVVFLHVTYVPAQEKNFTTAPAICHDGKAHFPREGVFVSNGTHWFVTQRNFYEPQIITTDNTFVSGNCDVVIGIVNNTVYDPLQPELDSFKEELDKYFKNHTSPDVDLGDISGINASVVNIQKEIDRLNEVAKNLNESLIDLQELGKYEQGSGYIPEAPRDGQAYVRKDGEWVLLSTFLGRSLEVLFQGPGSLPETGGGSDYKDDDDKGGGGSGGGGSGGGGSGGGGSGGGGSHHHHHH

SEQ ID NO: 59 - protein, 1297 aa, Artificial Sequence
  SEQ ID NO:2 + A892P + T572I + S884C + A893C
MFVFLVLLPLVSSQCVNLTTRTQLPPAYTNSFTRGVYYPDKVFRSSVLHSTQDLFLPFFSNVTWFHAIHVSGTNGTKRFDNPVLPFNDGVYFASTEKSNIIRGWIFGTTLDSKTQSLLIVNNATNVVIKVCEFQFCNDPFLGVYYHKNNKSWMESEFRVYSSANNCTFEYVSQPFLMDLEGKQGNFKNLREFVFKNIDGYFKIYSKHTPINLVRDLPQGFSALEPLVDLPIGINITRFQTLLALHRSYLTPGDSSSGWTAGAAAYYVGYLQPRTFLLKYNENGTITDAVDCALDPLSETKCTLKSFTVEKGIYQTSNFRVQPTESIVRFPNITNLCPFGEVFNATRFASVYAWNRKRISNCVADYSVLYNSASFSTFKCYGVSPTKLNDLCFTNVYADSFVIRGDEVRQIAPGQTGKIADYNYKLPDDFTGCVIAWNSNNLDSKVGGNYNYLYRLFRKSNLKPFERDISTEIYQAGSTPCNGVEGFNCYFPLQSYGFQPTNGVGYQPYRVVVLSFELLHAPATVCGPKKSTNLVKNKCVNFNFNGLTGTGVLTESNKKFLPFQQFGRDIADITDAVRDPQTLEILDITPCSFGGVSVITPGTNTSNQVAVLYQDVNCTEVPVAIHADQLTPTWRVYSTGSNVFQTRAGCLIGAEHVNNSYECDIPIGAGICASYQTQTNSPSRAGSVASQSIIAYTMSLGAENSVAYSNNSIAIPTNFTISVTTEILPVSMTKTSVDCTMYICGDSTECSNLLLQYGSFCTQLNRALTGIAVEQDKNTQEVFAQVKQIYKTPPIKDFGGFNFSQILPDPSKPSKRSFIEDLLFNKVTLADAGFIKQYGDCLGDIAARDLICAQKFNGLTVLPPLLTDEMIAQYTSALLAGTITCGWTFGAGPCLQIPFAMQMAYRFNGIGVTQNVLYENQKLIANQFNSAIGKIQDSLSSTASALGKLQDVVNQNAQALNTLVKQLSSNFGAISSVLNDILSRLDKVEAEVQIDRLITGRLQSLQTYVTQQLIRAAEIRASANLAATKMSECVLGQSKRVDFCGKGYHLMSFPQSAPHGVVFLHVTYVPAQEKNFTTAPAICHDGKAHFPREGVFVSNGTHWFVTQRNFYEPQIITTDNTFVSGNCDVVIGIVNNTVYDPLQPELDSFKEELDKYFKNHTSPDVDLGDISGINASVVNIQKEIDRLNEVAKNLNESLIDLQELGKYEQGSGYIPEAPRDGQAYVRKDGEWVLLSTFLGRSLEVLFQGPGSLPETGGGSDYKDDDDKGGGGSGGGGSGGGGSGGGGSGGGGSHHHHHH

SEQ ID NO: 60 - protein, 1297 aa, Artificial Sequence
  SEQ ID NO:2 + A892P + N532P + G880C + F888C
MFVFLVLLPLVSSQCVNLTTRTQLPPAYTNSFTRGVYYPDKVFRSSVLHSTQDLFLPFFSNVTWFHAIHVSGTNGTKRFDNPVLPFNDGVYFASTEKSNIIRGWIFGTTLDSKTQSLLIVNNATNVVIKVCEFQFCNDPFLGVYYHKNNKSWMESEFRVYSSANNCTFEYVSQPFLMDLEGKQGNFKNLREFVFKNIDGYFKIYSKHTPINLVRDLPQGFSALEPLVDLPIGINITRFQTLLALHRSYLTPGDSSSGWTAGAAAYYVGYLQPRTFLLKYNENGTITDAVDCALDPLSETKCTLKSFTVEKGIYQTSNFRVQPTESIVRFPNITNLCPFGEVFNATRFASVYAWNRKRISNCVADYSVLYNSASFSTFKCYGVSPTKLNDLCFTNVYADSFVIRGDEVRQIAPGQTGKIADYNYKLPDDFTGCVIAWNSNNLDSKVGGNYNYLYRLFRKSNLKPFERDISTEIYQAGSTPCNGVEGFNCYFPLQSYGFQPTNGVGYQPYRVVVLSFELLHAPATVCGPKKSTPLVKNKCVNFNFNGLTGTGVLTESNKKFLPFQQFGRDIADTTDAVRDPQTLEILDITPCSFGGVSVITPGTNTSNQVAVLYQDVNCTEVPVAIHADQLTPTWRVYSTGSNVFQTRAGCLIGAEHVNNSYECDIPIGAGICASYQTQTNSPSRAGSVASQSIIAYTMSLGAENSVAYSNNSIAIPTNFTISVTTEILPVSMTKTSVDCTMYICGDSTECSNLLLQYGSFCTQLNRALTGIAVEQDKNTQEVFAQVKQIYKTPPIKDFGGFNFSQILPDPSKPSKRSFIEDLLFNKVTLADAGFIKQYGDCLGDIAARDLICAQKFNGLTVLPPLLTDEMIAQYTSALLACTITSGWTCGAGPALQIPFAMQMAYRFNGIGVTQNVLYENQKLIANQFNSAIGKIQDSLSSTASALGKLQDVVNQNAQALNTLVKQLSSNFGAISSVLNDILSRLDKVEAEVQIDRLITGRLQSLQTYVTQQLIRAAEIRASANLAATKMSECVLGQSKRVDFCGKGYHLMSFPQSAPHGVVFLHVTYVPAQEKNFTTAPAICHDGKAHFPREGVFVSNGTHWFVTQRNFYEPQIITTDNTFVSGNCDVVIGIVNNTVYDPLQPELDSFKEELDKYFKNHTSPDVDLGDISGINASVVNIQKEIDRLNEVAKNLNESLIDLQELGKYEQGSGYIPEAPRDGQAYVRKDGEWVLLSTFLGRSLEVLFQGPGSLPETGGGSDYKDDDDKGGGGSGGGGSGGGGSGGGGSGGGGSHHHHHH

SEQ ID NO: 61 - protein, 1297 aa, Artificial Sequence
  SEQ ID NO:2 + A892P + N532P + S884C + A893C
MFVFLVLLPLVSSQCVNLTTRTQLPPAYTNSFTRGVYYPDKVFRSSVLHSTQDLFLPFFSNVTWFHAIHVSGTNGTKRFDNPVLPFNDGVYFASTEKSNIIRGWIFGTTLDSKTQSLLIVNNATNVVIKVCEFQFCNDPFLGVYYHKNNKSWMESEFRVYSSANNCTFEYVSQPFLMDLEGKQGNFKNLREFVFKNIDGYFKIYSKHTPINLVRDLPQGFSALEPLVDLPIGINITRFQTLLALHRSYLTPGDSSSGWTAGAAAYYVGYLQPRTFLLKYNENGTITDAVDCALDPLSETKCTLKSFTVEKGIYQTSNFRVQPTESIVRFPNITNLCPFGEVFNATRFASVYAWNRKRISNCVADYSVLYNSASFSTFKCYGVSPTKLNDLCFTNVYADSFVIRGDEVRQIAPGQTGKIADYNYKLPDDFTGCVIAWNSNNLDSKVGGNYNYLYRLFRKSNLKPFERDISTEIYQAGSTPCNGVEGFNCYFPLQSYGFQPTNGVGYQPYRVVVLSFELLHAPATVCGPKKSTPLVKNKCVNFNFNGLTGTGVLTESNKKFLPFQQFGRDIADTTDAVRDPQTLEILDITPCSFGGVSVITPGTNTSNQVAVLYQDVNCTEVPVAIHADQLTPTWRVYSTGSNVFQTRAGCLIGAEHVNNSYECDIPIGAGICASYQTQTNSPSRAGSVASQSIIAYTMSLGAENSVAYSNNSIAIPTNFTISVTTEILPVSMTKTSVDCTMYICGDSTECSNLLLQYGSFCTQLNRALTGIAVEQDKNTQEVFAQVKQIYKTPPIKDFGGFNFSQILPDPSKPSKRSFIEDLLFNKVTLADAGFIKQYGDCLGDIAARDLICAQKFNGLTVLPPLLTDEMIAQYTSALLAGTITCGWTFGAGPCLQIPFAMQMAYRFNGIGVTQNVLYENQKLIANQFNSAIGKIQDSLSSTASALGKLQDVVNQNAQALNTLVKQLSSNFGAISSVLNDILSRLDKVEAEVQIDRLITGRLQSLQTYVTQQLIRAAEIRASANLAATKMSECVLGQSKRVDFCGKGYHLMSFPQSAPHGVVFLHVTYVPAQEKNFTTAPAICHDGKAHFPREGVFVSNGTHWFVTQRNFYEPQIITTDNTFVSGNCDVVIGIVNNTVYDPLQPELDSFKEELDKYFKNHTSPDVDLGDISGINASVVNIQKEIDRLNEVAKNLNESLIDLQELGKYEQGSGYIPEAPRDGQAYVRKDGEWVLLSTFLGRSLEVLFQGPGSLPETGGGSDYKDDDDKGGGGSGGGGSGGGGSGGGGSGGGGSHHHHHH

SEQ ID NO: 62 - protein, 1297 aa, Artificial Sequence
  SEQ ID NO:2 + D614N + T572I + N532P
MFVFLVLLPLVSSQCVNLTTRTQLPPAYTNSFTRGVYYPDKVFRSSVLHSTQDLFLPFFSNVTWFHAIHVSGTNGTKRFDNPVLPFNDGVYFASTEKSNIIRGWIFGTTLDSKTQSLLIVNNATNVVIKVCEFQFCNDPFLGVYYHKNNKSWMESEFRVYSSANNCTFEYVSQPFLMDLEGKQGNFKNLREFVFKNIDGYFKIYSKHTPINLVRDLPQGFSALEPLVDLPIGINITRFQTLLALHRSYLTPGDSSSGWTAGAAAYYVGYLQPRTFLLKYNENGTITDAVDCALDPLSETKCTLKSFTVEKGIYQTSNFRVQPTESIVRFPNITNLCPFGEVFNATRFASVYAWNRKRISNCVADYSVLYNSASFSTFKCYGVSPTKLNDLCFTNVYADSFVIRGDEVRQIAPGQTGKIADYNYKLPDDFTGCVIAWNSNNLDSKVGGNYNYLYRLFRKSNLKPFERDISTEIYQAGSTPCNGVEGFNCYFPLQSYGFQPTNGVGYQPYRVVVLSFELLHAPATVCGPKKSTPLVKNKCVNFNFNGLTGTGVLTESNKKFLPFQQFGRDIADITDAVRDPQTLEILDITPCSFGGVSVITPGTNTSNQVAVLYQNVNCTEVPVAIHADQLTPTWRVYSTGSNVFQTRAGCLIGAEHVNNSYECDIPIGAGICASYQTQTNSPSRAGSVASQSIIAYTMSLGAENSVAYSNNSIAIPTNFTISVTTEILPVSMTKTSVDCTMYICGDSTECSNLLLQYGSFCTQLNRALTGIAVEQDKNTQEVFAQVKQIYKTPPIKDFGGFNFSQILPDPSKPSKRSFIEDLLFNKVTLADAGFIKQYGDCLGDIAARDLICAQKFNGLTVLPPLLTDEMIAQYTSALLAGTITSGWTFGAGAALQIPFAMQMAYRFNGIGVTQNVLYENQKLIANQFNSAIGKIQDSLSSTASALGKLQDVVNQNAQALNTLVKQLSSNFGAISSVLNDILSRLDKVEAEVQIDRLITGRLQSLQTYVTQQLIRAAEIRASANLAATKMSECVLGQSKRVDFCGKGYHLMSFPQSAPHGVVFLHVTYVPAQEKNFTTAPAICHDGKAHFPREGVFVSNGTHWFVTQRNFYEPQIITTDNTFVSGNCDVVIGIVNNTVYDPLQPELDSFKEELDKYFKNHTSPDVDLGDISGINASVVNIQKEIDRLNEVAKNLNESLIDLQELGKYEQGSGYIPEAPRDGQAYVRKDGEWVLLSTFLGRSLEVLFQGPGSLPETGGGSDYKDDDDKGGGGSGGGGSGGGGSGGGGSGGGGSHHHHHH

SEQ ID NO: 63 - protein, 1297 aa, Artificial Sequence
  SEQ ID NO:2 + D614N + T572I + G880C + F888C
MFVFLVLLPLVSSQCVNLTTRTQLPPAYTNSFTRGVYYPDKVFRSSVLHSTQDLFLPFFSNVTWFHAIHVSGTNGTKRFDNPVLPFNDGVYFASTEKSNIIRGWIFGTTLDSKTQSLLIVNNATNVVIKVCEFQFCNDPFLGVYYHKNNKSWMESEFRVYSSANNCTFEYVSQPFLMDLEGKQGNFKNLREFVFKNIDGYFKIYSKHTPINLVRDLPQGFSALEPLVDLPIGINITRFQTLLALHRSYLTPGDSSSGWTAGAAAYYVGYLQPRTFLLKYNENGTITDAVDCALDPLSETKCTLKSFTVEKGIYQTSNFRVQPTESIVRFPNITNLCPFGEVFNATRFASVYAWNRKRISNCVADYSVLYNSASFSTFKCYGVSPTKLNDLCFTNVYADSFVIRGDEVRQIAPGQTGKIADYNYKLPDDFTGCVIAWNSNNLDSKVGGNYNYLYRLFRKSNLKPFERDISTEIYQAGSTPCNGVEGFNCYFPLQSYGFQPTNGVGYQPYRVVVLSFELLHAPATVCGPKKSTNLVKNKCVNFNFNGLTGTGVLTESNKKFLPFQQFGRDIADITDAVRDPQTLEILDITPCSFGGVSVITPGTNTSNQVAVLYQNVNCTEVPVAIHADQLTPTWRVYSTGSNVFQTRAGCLIGAEHVNNSYECDIPIGAGICASYQTQTNSPSRAGSVASQSIIAYTMSLGAENSVAYSNNSIAIPTNFTISVTTEILPVSMTKTSVDCTMYICGDSTECSNLLLQYGSFCTQLNRALTGIAVEQDKNTQEVFAQVKQIYKTPPIKDFGGFNFSQILPDPSKPSKRSFIEDLLFNKVTLADAGFIKQYGDCLGDIAARDLICAQKFNGLTVLPPLLTDEMIAQYTSALLACTITSGWTCGAGAALQIPFAMQMAYRFNGIGVTQNVLYENQKLIANQFNSAIGKIQDSLSSTASALGKLQDVVNQNAQALNTLVKQLSSNFGAISSVLNDILSRLDKVEAEVQIDRLITGRLQSLQTYVTQQLIRAAEIRASANLAATKMSECVLGQSKRVDFCGKGYHLMSFPQSAPHGVVFLHVTYVPAQEKNFTTAPAICHDGKAHFPREGVFVSNGTHWFVTQRNFYEPQIITTDNTFVSGNCDVVIGIVNNTVYDPLQPELDSFKEELDKYFKNHTSPDVDLGDISGINASVVNIQKEIDRLNEVAKNLNESLIDLQELGKYEQGSGYIPEAPRDGQAYVRKDGEWVLLSTFLGRSLEVLFQGPGSLPETGGGSDYKDDDDKGGGGSGGGGSGGGGSGGGGSGGGGSHHHHHH

SEQ ID NO: 64 - protein, 1297 aa, Artificial Sequence
  SEQ ID NO:2 + D614N + T572I + S884C + A893C
MFVFLVLLPLVSSQCVNLTTRTQLPPAYTNSFTRGVYYPDKVFRSSVLHSTQDLFLPFFSNVTWFHAIHVSGTNGTKRFDNPVLPFNDGVYFASTEKSNIIRGWIFGTTLDSKTQSLLIVNNATNVVIKVCEFQFCNDPFLGVYYHKNNKSWMESEFRVYSSANNCTFEYVSQPFLMDLEGKQGNFKNLREFVFKNIDGYFKIYSKHTPINLVRDLPQGFSALEPLVDLPIGINITRFQTLLALHRSYLTPGDSSSGWTAGAAAYYVGYLQPRTFLLKYNENGTITDAVDCALDPLSETKCTLKSFTVEKGIYQTSNFRVQPTESIVRFPNITNLCPFGEVFNATRFASVYAWNRKRISNCVADYSVLYNSASFSTFKCYGVSPTKLNDLCFTNVYADSFVIRGDEVRQIAPGQTGKIADYNYKLPDDFTGCVIAWNSNNLDSKVGGNYNYLYRLFRKSNLKPFERDISTEIYQAGSTPCNGVEGFNCYFPLQSYGFQPTNGVGYQPYRVVVLSFELLHAPATVCGPKKSTNLVKNKCVNFNFNGLTGTGVLTESNKKFLPFQQFGRDIADITDAVRDPQTLEILDITPCSFGGVSVITPGTNTSNQVAVLYQNVNCTEVPVAIHADQLTPTWRVYSTGSNVFQTRAGCLIGAEHVNNSYECDIPIGAGICASYQTQTNSPSRAGSVASQSIIAYTMSLGAENSVAYSNNSIAIPTNFTISVTTEILPVSMTKTSVDCTMYICGDSTECSNLLLQYGSFCTQLNRALTGIAVEQDKNTQEVFAQVKQIYKTPPIKDFGGFNFSQILPDPSKPSKRSFIEDLLFNKVTLADAGFIKQYGDCLGDIAARDLICAQKFNGLTVLPPLLTDEMIAQYTSALLAGTITCGWTFGAGACLQIPFAMQMAYRFNGIGVTQNVLYENQKLIANQFNSAIGKIQDSLSSTASALGKLQDVVNQNAQALNTLVKQLSSNFGAISSVLNDILSRLDKVEAEVQIDRLITGRLQSLQTYVTQQLIRAAEIRASANLAATKMSECVLGQSKRVDFCGKGYHLMSFPQSAPHGVVFLHVTYVPAQEKNFTTAPAICHDGKAHFPREGVFVSNGTHWFVTQRNFYEPQIITTDNTFVSGNCDVVIGIVNNTVYDPLQPELDSFKEELDKYFKNHTSPDVDLGDISGINASVVNIQKEIDRLNEVAKNLNESLIDLQELGKYEQGSGYIPEAPRDGQAYVRKDGEWVLLSTFLGRSLEVLFQGPGSLPETGGGSDYKDDDDKGGGGSGGGGSGGGGSGGGGSGGGGSHHHHHH

SEQ ID NO: 65 - protein, 1297 aa, Artificial Sequence
  SEQ ID NO:2 + D614N + N532P + G880C + F888C
MFVFLVLLPLVSSQCVNLTTRTQLPPAYTNSFTRGVYYPDKVFRSSVLHSTQDLFLPFFSNVTWFHAIHVSGTNGTKRFDNPVLPFNDGVYFASTEKSNIIRGWIFGTTLDSKTQSLLIVNNATNVVIKVCEFQFCNDPFLGVYYHKNNKSWMESEFRVYSSANNCTFEYVSQPFLMDLEGKQGNFKNLREFVFKNIDGYFKIYSKHTPINLVRDLPQGFSALEPLVDLPIGINITRFQTLLALHRSYLTPGDSSSGWTAGAAAYYVGYLQPRTFLLKYNENGTITDAVDCALDPLSETKCTLKSFTVEKGIYQTSNFRVQPTESIVRFPNITNLCPFGEVFNATRFASVYAWNRKRISNCVADYSVLYNSASFSTFKCYGVSPTKLNDLCFTNVYADSFVIRGDEVRQIAPGQTGKIADYNYKLPDDFTGCVIAWNSNNLDSKVGGNYNYLYRLFRKSNLKPFERDISTEIYQAGSTPCNGVEGFNCYFPLQSYGFQPTNGVGYQPYRVVVLSFELLHAPATVCGPKKSTPLVKNKCVNFNFNGLTGTGVLTESNKKFLPFQQFGRDIADTTDAVRDPQTLEILDITPCSFGGVSVITPGTNTSNQVAVLYQNVNCTEVPVAIHADQLTPTWRVYSTGSNVFQTRAGCLIGAEHVNNSYECDIPIGAGICASYQTQTNSPSRAGSVASQSIIAYTMSLGAENSVAYSNNSIAIPTNFTISVTTEILPVSMTKTSVDCTMYICGDSTECSNLLLQYGSFCTQLNRALTGIAVEQDKNTQEVFAQVKQIYKTPPIKDFGGFNFSQILPDPSKPSKRSFIEDLLFNKVTLADAGFIKQYGDCLGDIAARDLICAQKFNGLTVLPPLLTDEMIAQYTSALLACTITSGWTCGAGAALQIPFAMQMAYRFNGIGVTQNVLYENQKLIANQFNSAIGKIQDSLSSTASALGKLQDVVNQNAQALNTLVKQLSSNFGAISSVLNDILSRLDKVEAEVQIDRLITGRLQSLQTYVTQQLIRAAEIRASANLAATKMSECVLGQSKRVDFCGKGYHLMSFPQSAPHGVVFLHVTYVPAQEKNFTTAPAICHDGKAHFPREGVFVSNGTHWFVTQRNFYEPQIITTDNTFVSGNCDVVIGIVNNTVYDPLQPELDSFKEELDKYFKNHTSPDVDLGDISGINASVVNIQKEIDRLNEVAKNLNESLIDLQELGKYEQGSGYIPEAPRDGQAYVRKDGEWVLLSTFLGRSLEVLFQGPGSLPETGGGSDYKDDDDKGGGGSGGGGSGGGGSGGGGSGGGGSHHHHHH

SEQ ID NO: 66 - protein, 1297 aa, Artificial Sequence
  SEQ ID NO:2 + D614N + N532P + S884C + A893C
MFVFLVLLPLVSSQCVNLTTRTQLPPAYTNSFTRGVYYPDKVFRSSVLHSTQDLFLPFFSNVTWFHAIHVSGTNGTKRFDNPVLPFNDGVYFASTEKSNIIRGWIFGTTLDSKTQSLLIVNNATNVVIKVCEFQFCNDPFLGVYYHKNNKSWMESEFRVYSSANNCTFEYVSQPFLMDLEGKQGNFKNLREFVFKNIDGYFKIYSKHTPINLVRDLPQGFSALEPLVDLPIGINITRFQTLLALHRSYLTPGDSSSGWTAGAAAYYVGYLQPRTFLLKYNENGTITDAVDCALDPLSETKCTLKSFTVEKGIYQTSNFRVQPTESIVRFPNITNLCPFGEVFNATRFASVYAWNRKRISNCVADYSVLYNSASFSTFKCYGVSPTKLNDLCFTNVYADSFVIRGDEVRQIAPGQTGKIADYNYKLPDDFTGCVIAWNSNNLDSKVGGNYNYLYRLFRKSNLKPFERDISTEIYQAGSTPCNGVEGFNCYFPLQSYGFQPTNGVGYQPYRVVVLSFELLHAPATVCGPKKSTPLVKNKCVNFNFNGLTGTGVLTESNKKFLPFQQFGRDIADTTDAVRDPQTLEILDITPCSFGGVSVITPGTNTSNQVAVLYQNVNCTEVPVAIHADQLTPTWRVYSTGSNVFQTRAGCLIGAEHVNNSYECDIPIGAGICASYQTQTNSPSRAGSVASQSIIAYTMSLGAENSVAYSNNSIAIPTNFTISVTTEILPVSMTKTSVDCTMYICGDSTECSNLLLQYGSFCTQLNRALTGIAVEQDKNTQEVFAQVKQIYKTPPIKDFGGFNFSQILPDPSKPSKRSFIEDLLFNKVTLADAGFIKQYGDCLGDIAARDLICAQKFNGLTVLPPLLTDEMIAQYTSALLAGTITCGWTFGAGACLQIPFAMQMAYRFNGIGVTQNVLYENQKLIANQFNSAIGKIQDSLSSTASALGKLQDVVNQNAQALNTLVKQLSSNFGAISSVLNDILSRLDKVEAEVQIDRLITGRLQSLQTYVTQQLIRAAEIRASANLAATKMSECVLGQSKRVDFCGKGYHLMSFPQSAPHGVVFLHVTYVPAQEKNFTTAPAICHDGKAHFPREGVFVSNGTHWFVTQRNFYEPQIITTDNTFVSGNCDVVIGIVNNTVYDPLQPELDSFKEELDKYFKNHTSPDVDLGDISGINASVVNIQKEIDRLNEVAKNLNESLIDLQELGKYEQGSGYIPEAPRDGQAYVRKDGEWVLLSTFLGRSLEVLFQGPGSLPETGGGSDYKDDDDKGGGGSGGGGSGGGGSGGGGSGGGGSHHHHHH

SEQ ID NO: 67 - protein, 1297 aa, Artificial Sequence
  SEQ ID NO:2 + T572I + N532P + G880C + F888C
MFVFLVLLPLVSSQCVNLTTRTQLPPAYTNSFTRGVYYPDKVFRSSVLHSTQDLFLPFFSNVTWFHAIHVSGTNGTKRFDNPVLPFNDGVYFASTEKSNIIRGWIFGTTLDSKTQSLLIVNNATNVVIKVCEFQFCNDPFLGVYYHKNNKSWMESEFRVYSSANNCTFEYVSQPFLMDLEGKQGNFKNLREFVFKNIDGYFKIYSKHTPINLVRDLPQGFSALEPLVDLPIGINITRFQTLLALHRSYLTPGDSSSGWTAGAAAYYVGYLQPRTFLLKYNENGTITDAVDCALDPLSETKCTLKSFTVEKGIYQTSNFRVQPTESIVRFPNITNLCPFGEVFNATRFASVYAWNRKRISNCVADYSVLYNSASFSTFKCYGVSPTKLNDLCFTNVYADSFVIRGDEVRQIAPGQTGKIADYNYKLPDDFTGCVIAWNSNNLDSKVGGNYNYLYRLFRKSNLKPFERDISTEIYQAGSTPCNGVEGFNCYFPLQSYGFQPTNGVGYQPYRVVVLSFELLHAPATVCGPKKSTPLVKNKCVNFNFNGLTGTGVLTESNKKFLPFQQFGRDIADITDAVRDPQTLEILDITPCSFGGVSVITPGTNTSNQVAVLYQDVNCTEVPVAIHADQLTPTWRVYSTGSNVFQTRAGCLIGAEHVNNSYECDIPIGAGICASYQTQTNSPSRAGSVASQSIIAYTMSLGAENSVAYSNNSIAIPTNFTISVTTEILPVSMTKTSVDCTMYICGDSTECSNLLLQYGSFCTQLNRALTGIAVEQDKNTQEVFAQVKQIYKTPPIKDFGGFNFSQILPDPSKPSKRSFIEDLLFNKVTLADAGFIKQYGDCLGDIAARDLICAQKFNGLTVLPPLLTDEMIAQYTSALLACTITSGWTCGAGAALQIPFAMQMAYRFNGIGVTQNVLYENQKLIANQFNSAIGKIQDSLSSTASALGKLQDVVNQNAQALNTLVKQLSSNFGAISSVLNDILSRLDKVEAEVQIDRLITGRLQSLQTYVTQQLIRAAEIRASANLAATKMSECVLGQSKRVDFCGKGYHLMSFPQSAPHGVVFLHVTYVPAQEKNFTTAPAICHDGKAHFPREGVFVSNGTHWFVTQRNFYEPQIITTDNTFVSGNCDVVIGIVNNTVYDPLQPELDSFKEELDKYFKNHTSPDVDLGDISGINASVVNIQKEIDRLNEVAKNLNESLIDLQELGKYEQGSGYIPEAPRDGQAYVRKDGEWVLLSTFLGRSLEVLFQGPGSLPETGGGSDYKDDDDKGGGGSGGGGSGGGGSGGGGSGGGGSHHHHHH

SEQ ID NO: 68 - protein, 1297 aa, Artificial Sequence
  SEQ ID NO:2 + T572I + N532P + S884C + A893C
MFVFLVLLPLVSSQCVNLTTRTQLPPAYTNSFTRGVYYPDKVFRSSVLHSTQDLFLPFFSNVTWFHAIHVSGTNGTKRFDNPVLPFNDGVYFASTEKSNIIRGWIFGTTLDSKTQSLLIVNNATNVVIKVCEFQFCNDPFLGVYYHKNNKSWMESEFRVYSSANNCTFEYVSQPFLMDLEGKQGNFKNLREFVFKNIDGYFKIYSKHTPINLVRDLPQGFSALEPLVDLPIGINITRFQTLLALHRSYLTPGDSSSGWTAGAAAYYVGYLQPRTFLLKYNENGTITDAVDCALDPLSETKCTLKSFTVEKGIYQTSNFRVQPTESIVRFPNITNLCPFGEVFNATRFASVYAWNRKRISNCVADYSVLYNSASFSTFKCYGVSPTKLNDLCFTNVYADSFVIRGDEVRQIAPGQTGKIADYNYKLPDDFTGCVIAWNSNNLDSKVGGNYNYLYRLFRKSNLKPFERDISTEIYQAGSTPCNGVEGFNCYFPLQSYGFQPTNGVGYQPYRVVVLSFELLHAPATVCGPKKSTPLVKNKCVNFNFNGLTGTGVLTESNKKFLPFQQFGRDIADITDAVRDPQTLEILDITPCSFGGVSVITPGTNTSNQVAVLYQDVNCTEVPVAIHADQLTPTWRVYSTGSNVFQTRAGCLIGAEHVNNSYECDIPIGAGICASYQTQTNSPSRAGSVASQSIIAYTMSLGAENSVAYSNNSIAIPTNFTISVTTEILPVSMTKTSVDCTMYICGDSTECSNLLLQYGSFCTQLNRALTGIAVEQDKNTQEVFAQVKQIYKTPPIKDFGGFNFSQILPDPSKPSKRSFIEDLLFNKVTLADAGFIKQYGDCLGDIAARDLICAQKFNGLTVLPPLLTDEMIAQYTSALLAGTITCGWTFGAGACLQIPFAMQMAYRFNGIGVTQNVLYENQKLIANQFNSAIGKIQDSLSSTASALGKLQDVVNQNAQALNTLVKQLSSNFGAISSVLNDILSRLDKVEAEVQIDRLITGRLQSLQTYVTQQLIRAAEIRASANLAATKMSECVLGQSKRVDFCGKGYHLMSFPQSAPHGVVFLHVTYVPAQEKNFTTAPAICHDGKAHFPREGVFVSNGTHWFVTQRNFYEPQIITTDNTFVSGNCDVVIGIVNNTVYDPLQPELDSFKEELDKYFKNHTSPDVDLGDISGINASVVNIQKEIDRLNEVAKNLNESLIDLQELGKYEQGSGYIPEAPRDGQAYVRKDGEWVLLSTFLGRSLEVLFQGPGSLPETGGGSDYKDDDDKGGGGSGGGGSGGGGSGGGGSGGGGSHHHHHH

SEQ ID NO: 69 - protein, 1297 aa, Artificial Sequence
  SEQ ID NO:2 + A942P + A892P + D614N + T572I
MFVFLVLLPLVSSQCVNLTTRTQLPPAYTNSFTRGVYYPDKVFRSSVLHSTQDLFLPFFSNVTWFHAIHVSGTNGTKRFDNPVLPFNDGVYFASTEKSNIIRGWIFGTTLDSKTQSLLIVNNATNVVIKVCEFQFCNDPFLGVYYHKNNKSWMESEFRVYSSANNCTFEYVSQPFLMDLEGKQGNFKNLREFVFKNIDGYFKIYSKHTPINLVRDLPQGFSALEPLVDLPIGINITRFQTLLALHRSYLTPGDSSSGWTAGAAAYYVGYLQPRTFLLKYNENGTITDAVDCALDPLSETKCTLKSFTVEKGIYQTSNFRVQPTESIVRFPNITNLCPFGEVFNATRFASVYAWNRKRISNCVADYSVLYNSASFSTFKCYGVSPTKLNDLCFTNVYADSFVIRGDEVRQIAPGQTGKIADYNYKLPDDFTGCVIAWNSNNLDSKVGGNYNYLYRLFRKSNLKPFERDISTEIYQAGSTPCNGVEGFNCYFPLQSYGFQPTNGVGYQPYRVVVLSFELLHAPATVCGPKKSTNLVKNKCVNFNFNGLTGTGVLTESNKKFLPFQQFGRDIADITDAVRDPQTLEILDITPCSFGGVSVITPGTNTSNQVAVLYQNVNCTEVPVAIHADQLTPTWRVYSTGSNVFQTRAGCLIGAEHVNNSYECDIPIGAGICASYQTQTNSPSRAGSVASQSIIAYTMSLGAENSVAYSNNSIAIPTNFTISVTTEILPVSMTKTSVDCTMYICGDSTECSNLLLQYGSFCTQLNRALTGIAVEQDKNTQEVFAQVKQIYKTPPIKDFGGFNFSQILPDPSKPSKRSFIEDLLFNKVTLADAGFIKQYGDCLGDIAARDLICAQKFNGLTVLPPLLTDEMIAQYTSALLAGTITSGWTFGAGPALQIPFAMQMAYRFNGIGVTQNVLYENQKLIANQFNSAIGKIQDSLSSTPSALGKLQDVVNQNAQALNTLVKQLSSNFGAISSVLNDILSRLDKVEAEVQIDRLITGRLQSLQTYVTQQLIRAAEIRASANLAATKMSECVLGQSKRVDFCGKGYHLMSFPQSAPHGVVFLHVTYVPAQEKNFTTAPAICHDGKAHFPREGVFVSNGTHWFVTQRNFYEPQIITTDNTFVSGNCDVVIGIVNNTVYDPLQPELDSFKEELDKYFKNHTSPDVDLGDISGINASVVNIQKEIDRLNEVAKNLNESLIDLQELGKYEQGSGYIPEAPRDGQAYVRKDGEWVLLSTFLGRSLEVLFQGPGSLPETGGGSDYKDDDDKGGGGSGGGGSGGGGSGGGGSGGGGSHHHHHH

SEQ ID NO: 70 - protein, 1297 aa, Artificial Sequence
  SEQ ID NO:2 + A942P + A892P + D614N + N532P
MFVFLVLLPLVSSQCVNLTTRTQLPPAYTNSFTRGVYYPDKVFRSSVLHSTQDLFLPFFSNVTWFHAIHVSGTNGTKRFDNPVLPFNDGVYFASTEKSNIIRGWIFGTTLDSKTQSLLIVNNATNVVIKVCEFQFCNDPFLGVYYHKNNKSWMESEFRVYSSANNCTFEYVSQPFLMDLEGKQGNFKNLREFVFKNIDGYFKIYSKHTPINLVRDLPQGFSALEPLVDLPIGINITRFQTLLALHRSYLTPGDSSSGWTAGAAAYYVGYLQPRTFLLKYNENGTITDAVDCALDPLSETKCTLKSFTVEKGIYQTSNFRVQPTESIVRFPNITNLCPFGEVFNATRFASVYAWNRKRISNCVADYSVLYNSASFSTFKCYGVSPTKLNDLCFTNVYADSFVIRGDEVRQIAPGQTGKIADYNYKLPDDFTGCVIAWNSNNLDSKVGGNYNYLYRLFRKSNLKPFERDISTEIYQAGSTPCNGVEGFNCYFPLQSYGFQPTNGVGYQPYRVVVLSFELLHAPATVCGPKKSTPLVKNKCVNFNFNGLTGTGVLTESNKKFLPFQQFGRDIADTTDAVRDPQTLEILDITPCSFGGVSVITPGTNTSNQVAVLYQNVNCTEVPVAIHADQLTPTWRVYSTGSNVFQTRAGCLIGAEHVNNSYECDIPIGAGICASYQTQTNSPSRAGSVASQSIIAYTMSLGAENSVAYSNNSIAIPTNFTISVTTEILPVSMTKTSVDCTMYICGDSTECSNLLLQYGSFCTQLNRALTGIAVEQDKNTQEVFAQVKQIYKTPPIKDFGGFNFSQILPDPSKPSKRSFIEDLLFNKVTLADAGFIKQYGDCLGDIAARDLICAQKFNGLTVLPPLLTDEMIAQYTSALLAGTITSGWTFGAGPALQIPFAMQMAYRFNGIGVTQNVLYENQKLIANQFNSAIGKIQDSLSSTPSALGKLQDVVNQNAQALNTLVKQLSSNFGAISSVLNDILSRLDKVEAEVQIDRLITGRLQSLQTYVTQQLIRAAEIRASANLAATKMSECVLGQSKRVDFCGKGYHLMSFPQSAPHGVVFLHVTYVPAQEKNFTTAPAICHDGKAHFPREGVFVSNGTHWFVTQRNFYEPQIITTDNTFVSGNCDVVIGIVNNTVYDPLQPELDSFKEELDKYFKNHTSPDVDLGDISGINASVVNIQKEIDRLNEVAKNLNESLIDLQELGKYEQGSGYIPEAPRDGQAYVRKDGEWVLLSTFLGRSLEVLFQGPGSLPETGGGSDYKDDDDKGGGGSGGGGSGGGGSGGGGSGGGGSHHHHHH

SEQ ID NO: 71 - protein, 1297 aa, Artificial Sequence
  SEQ ID NO:2 + A942P + A892P + D614N + G880C + F888C
MFVFLVLLPLVSSQCVNLTTRTQLPPAYTNSFTRGVYYPDKVFRSSVLHSTQDLFLPFFSNVTWFHAIHVSGTNGTKRFDNPVLPFNDGVYFASTEKSNIIRGWIFGTTLDSKTQSLLIVNNATNVVIKVCEFQFCNDPFLGVYYHKNNKSWMESEFRVYSSANNCTFEYVSQPFLMDLEGKQGNFKNLREFVFKNIDGYFKIYSKHTPINLVRDLPQGFSALEPLVDLPIGINITRFQTLLALHRSYLTPGDSSSGWTAGAAAYYVGYLQPRTFLLKYNENGTITDAVDCALDPLSETKCTLKSFTVEKGIYQTSNFRVQPTESIVRFPNITNLCPFGEVFNATRFASVYAWNRKRISNCVADYSVLYNSASFSTFKCYGVSPTKLNDLCFTNVYADSFVIRGDEVRQIAPGQTGKIADYNYKLPDDFTGCVIAWNSNNLDSKVGGNYNYLYRLFRKSNLKPFERDISTEIYQAGSTPCNGVEGFNCYFPLQSYGFQPTNGVGYQPYRVVVLSFELLHAPATVCGPKKSTNLVKNKCVNFNFNGLTGTGVLTESNKKFLPFQQFGRDIADTTDAVRDPQTLEILDITPCSFGGVSVITPGTNTSNQVAVLYQNVNCTEVPVAIHADQLTPTWRVYSTGSNVFQTRAGCLIGAEHVNNSYECDIPIGAGICASYQTQTNSPSRAGSVASQSIIAYTMSLGAENSVAYSNNSIAIPTNFTISVTTEILPVSMTKTSVDCTMYICGDSTECSNLLLQYGSFCTQLNRALTGIAVEQDKNTQEVFAQVKQIYKTPPIKDFGGFNFSQILPDPSKPSKRSFIEDLLFNKVTLADAGFIKQYGDCLGDIAARDLICAQKFNGLTVLPPLLTDEMIAQYTSALLACTITSGWTCGAGPALQIPFAMQMAYRFNGIGVTQNVLYENQKLIANQFNSAIGKIQDSLSSTPSALGKLQDVVNQNAQALNTLVKQLSSNFGAISSVLNDILSRLDKVEAEVQIDRLITGRLQSLQTYVTQQLIRAAEIRASANLAATKMSECVLGQSKRVDFCGKGYHLMSFPQSAPHGVVFLHVTYVPAQEKNFTTAPAICHDGKAHFPREGVFVSNGTHWFVTQRNFYEPQIITTDNTFVSGNCDVVIGIVNNTVYDPLQPELDSFKEELDKYFKNHTSPDVDLGDISGINASVVNIQKEIDRLNEVAKNLNESLIDLQELGKYEQGSGYIPEAPRDGQAYVRKDGEWVLLSTFLGRSLEVLFQGPGSLPETGGGSDYKDDDDKGGGGSGGGGSGGGGSGGGGSGGGGSHHHHHH

SEQ ID NO: 72 - protein, 1297 aa, Artificial Sequence
  SEQ ID NO:2 + A942P + A892P + D614N + S884C + A893C
MFVFLVLLPLVSSQCVNLTTRTQLPPAYTNSFTRGVYYPDKVFRSSVLHSTQDLFLPFFSNVTWFHAIHVSGTNGTKRFDNPVLPFNDGVYFASTEKSNIIRGWIFGTTLDSKTQSLLIVNNATNVVIKVCEFQFCNDPFLGVYYHKNNKSWMESEFRVYSSANNCTFEYVSQPFLMDLEGKQGNFKNLREFVFKNIDGYFKIYSKHTPINLVRDLPQGFSALEPLVDLPIGINITRFQTLLALHRSYLTPGDSSSGWTAGAAAYYVGYLQPRTFLLKYNENGTITDAVDCALDPLSETKCTLKSFTVEKGIYQTSNFRVQPTESIVRFPNITNLCPFGEVFNATRFASVYAWNRKRISNCVADYSVLYNSASFSTFKCYGVSPTKLNDLCFTNVYADSFVIRGDEVRQIAPGQTGKIADYNYKLPDDFTGCVIAWNSNNLDSKVGGNYNYLYRLFRKSNLKPFERDISTEIYQAGSTPCNGVEGFNCYFPLQSYGFQPTNGVGYQPYRVVVLSFELLHAPATVCGPKKSTNLVKNKCVNFNFNGLTGTGVLTESNKKFLPFQQFGRDIADTTDAVRDPQTLEILDITPCSFGGVSVITPGTNTSNQVAVLYQNVNCTEVPVAIHADQLTPTWRVYSTGSNVFQTRAGCLIGAEHVNNSYECDIPIGAGICASYQTQTNSPSRAGSVASQSIIAYTMSLGAENSVAYSNNSIAIPTNFTISVTTEILPVSMTKTSVDCTMYICGDSTECSNLLLQYGSFCTQLNRALTGIAVEQDKNTQEVFAQVKQIYKTPPIKDFGGFNFSQILPDPSKPSKRSFIEDLLFNKVTLADAGFIKQYGDCLGDIAARDLICAQKFNGLTVLPPLLTDEMIAQYTSALLAGTITCGWTFGAGPCLQIPFAMQMAYRFNGIGVTQNVLYENQKLIANQFNSAIGKIQDSLSSTPSALGKLQDVVNQNAQALNTLVKQLSSNFGAISSVLNDILSRLDKVEAEVQIDRLITGRLQSLQTYVTQQLIRAAEIRASANLAATKMSECVLGQSKRVDFCGKGYHLMSFPQSAPHGVVFLHVTYVPAQEKNFTTAPAICHDGKAHFPREGVFVSNGTHWFVTQRNFYEPQIITTDNTFVSGNCDVVIGIVNNTVYDPLQPELDSFKEELDKYFKNHTSPDVDLGDISGINASVVNIQKEIDRLNEVAKNLNESLIDLQELGKYEQGSGYIPEAPRDGQAYVRKDGEWVLLSTFLGRSLEVLFQGPGSLPETGGGSDYKDDDDKGGGGSGGGGSGGGGSGGGGSGGGGSHHHHHH

SEQ ID NO: 73 - protein, 1297 aa, Artificial Sequence
  SEQ ID NO:2 + A942P + A892P + T572I + N532P
MFVFLVLLPLVSSQCVNLTTRTQLPPAYTNSFTRGVYYPDKVFRSSVLHSTQDLFLPFFSNVTWFHAIHVSGTNGTKRFDNPVLPFNDGVYFASTEKSNIIRGWIFGTTLDSKTQSLLIVNNATNVVIKVCEFQFCNDPFLGVYYHKNNKSWMESEFRVYSSANNCTFEYVSQPFLMDLEGKQGNFKNLREFVFKNIDGYFKIYSKHTPINLVRDLPQGFSALEPLVDLPIGINITRFQTLLALHRSYLTPGDSSSGWTAGAAAYYVGYLQPRTFLLKYNENGTITDAVDCALDPLSETKCTLKSFTVEKGIYQTSNFRVQPTESIVRFPNITNLCPFGEVFNATRFASVYAWNRKRISNCVADYSVLYNSASFSTFKCYGVSPTKLNDLCFTNVYADSFVIRGDEVRQIAPGQTGKIADYNYKLPDDFTGCVIAWNSNNLDSKVGGNYNYLYRLFRKSNLKPFERDISTEIYQAGSTPCNGVEGFNCYFPLQSYGFQPTNGVGYQPYRVVVLSFELLHAPATVCGPKKSTPLVKNKCVNFNFNGLTGTGVLTESNKKFLPFQQFGRDIADITDAVRDPQTLEILDITPCSFGGVSVITPGTNTSNQVAVLYQDVNCTEVPVAIHADQLTPTWRVYSTGSNVFQTRAGCLIGAEHVNNSYECDIPIGAGICASYQTQTNSPSRAGSVASQSIIAYTMSLGAENSVAYSNNSIAIPTNFTISVTTEILPVSMTKTSVDCTMYICGDSTECSNLLLQYGSFCTQLNRALTGIAVEQDKNTQEVFAQVKQIYKTPPIKDFGGFNFSQILPDPSKPSKRSFIEDLLFNKVTLADAGFIKQYGDCLGDIAARDLICAQKFNGLTVLPPLLTDEMIAQYTSALLAGTITSGWTFGAGPALQIPFAMQMAYRFNGIGVTQNVLYENQKLIANQFNSAIGKIQDSLSSTPSALGKLQDVVNQNAQALNTLVKQLSSNFGAISSVLNDILSRLDKVEAEVQIDRLITGRLQSLQTYVTQQLIRAAEIRASANLAATKMSECVLGQSKRVDFCGKGYHLMSFPQSAPHGVVFLHVTYVPAQEKNFTTAPAICHDGKAHFPREGVFVSNGTHWFVTQRNFYEPQIITTDNTFVSGNCDVVIGIVNNTVYDPLQPELDSFKEELDKYFKNHTSPDVDLGDISGINASVVNIQKEIDRLNEVAKNLNESLIDLQELGKYEQGSGYIPEAPRDGQAYVRKDGEWVLLSTFLGRSLEVLFQGPGSLPETGGGSDYKDDDDKGGGGSGGGGSGGGGSGGGGSGGGGSHHHHHH

SEQ ID NO: 74 - protein, 1297 aa, Artificial Sequence
  SEQ ID NO:2 + A942P + A892P + T572I + G880C + F888C
MFVFLVLLPLVSSQCVNLTTRTQLPPAYTNSFTRGVYYPDKVFRSSVLHSTQDLFLPFFSNVTWFHAIHVSGTNGTKRFDNPVLPFNDGVYFASTEKSNIIRGWIFGTTLDSKTQSLLIVNNATNVVIKVCEFQFCNDPFLGVYYHKNNKSWMESEFRVYSSANNCTFEYVSQPFLMDLEGKQGNFKNLREFVFKNIDGYFKIYSKHTPINLVRDLPQGFSALEPLVDLPIGINITRFQTLLALHRSYLTPGDSSSGWTAGAAAYYVGYLQPRTFLLKYNENGTITDAVDCALDPLSETKCTLKSFTVEKGIYQTSNFRVQPTESIVRFPNITNLCPFGEVFNATRFASVYAWNRKRISNCVADYSVLYNSASFSTFKCYGVSPTKLNDLCFTNVYADSFVIRGDEVRQIAPGQTGKIADYNYKLPDDFTGCVIAWNSNNLDSKVGGNYNYLYRLFRKSNLKPFERDISTEIYQAGSTPCNGVEGFNCYFPLQSYGFQPTNGVGYQPYRVVVLSFELLHAPATVCGPKKSTNLVKNKCVNFNFNGLTGTGVLTESNKKFLPFQQFGRDIADITDAVRDPQTLEILDITPCSFGGVSVITPGTNTSNQVAVLYQDVNCTEVPVAIHADQLTPTWRVYSTGSNVFQTRAGCLIGAEHVNNSYECDIPIGAGICASYQTQTNSPSRAGSVASQSIIAYTMSLGAENSVAYSNNSIAIPTNFTISVTTEILPVSMTKTSVDCTMYICGDSTECSNLLLQYGSFCTQLNRALTGIAVEQDKNTQEVFAQVKQIYKTPPIKDFGGFNFSQILPDPSKPSKRSFIEDLLFNKVTLADAGFIKQYGDCLGDIAARDLICAQKFNGLTVLPPLLTDEMIAQYTSALLACTITSGWTCGAGPALQIPFAMQMAYRFNGIGVTQNVLYENQKLIANQFNSAIGKIQDSLSSTPSALGKLQDVVNQNAQALNTLVKQLSSNFGAISSVLNDILSRLDKVEAEVQIDRLITGRLQSLQTYVTQQLIRAAEIRASANLAATKMSECVLGQSKRVDFCGKGYHLMSFPQSAPHGVVFLHVTYVPAQEKNFTTAPAICHDGKAHFPREGVFVSNGTHWFVTQRNFYEPQIITTDNTFVSGNCDVVIGIVNNTVYDPLQPELDSFKEELDKYFKNHTSPDVDLGDISGINASVVNIQKEIDRLNEVAKNLNESLIDLQELGKYEQGSGYIPEAPRDGQAYVRKDGEWVLLSTFLGRSLEVLFQGPGSLPETGGGSDYKDDDDKGGGGSGGGGSGGGGSGGGGSGGGGSHHHHHH

SEQ ID NO: 75 - protein, 1297 aa, Artificial Sequence
  SEQ ID NO:2 + A942P + A892P + T572I + S884 + A893C
MFVFLVLLPLVSSQCVNLTTRTQLPPAYTNSFTRGVYYPDKVFRSSVLHSTQDLFLPFFSNVTWFHAIHVSGTNGTKRFDNPVLPFNDGVYFASTEKSNIIRGWIFGTTLDSKTQSLLIVNNATNVVIKVCEFQFCNDPFLGVYYHKNNKSWMESEFRVYSSANNCTFEYVSQPFLMDLEGKQGNFKNLREFVFKNIDGYFKIYSKHTPINLVRDLPQGFSALEPLVDLPIGINITRFQTLLALHRSYLTPGDSSSGWTAGAAAYYVGYLQPRTFLLKYNENGTITDAVDCALDPLSETKCTLKSFTVEKGIYQTSNFRVQPTESIVRFPNITNLCPFGEVFNATRFASVYAWNRKRISNCVADYSVLYNSASFSTFKCYGVSPTKLNDLCFTNVYADSFVIRGDEVRQIAPGQTGKIADYNYKLPDDFTGCVIAWNSNNLDSKVGGNYNYLYRLFRKSNLKPFERDISTEIYQAGSTPCNGVEGFNCYFPLQSYGFQPTNGVGYQPYRVVVLSFELLHAPATVCGPKKSTNLVKNKCVNFNFNGLTGTGVLTESNKKFLPFQQFGRDIADITDAVRDPQTLEILDITPCSFGGVSVITPGTNTSNQVAVLYQDVNCTEVPVAIHADQLTPTWRVYSTGSNVFQTRAGCLIGAEHVNNSYECDIPIGAGICASYQTQTNSPSRAGSVASQSIIAYTMSLGAENSVAYSNNSIAIPTNFTISVTTEILPVSMTKTSVDCTMYICGDSTECSNLLLQYGSFCTQLNRALTGIAVEQDKNTQEVFAQVKQIYKTPPIKDFGGFNFSQILPDPSKPSKRSFIEDLLFNKVTLADAGFIKQYGDCLGDIAARDLICAQKFNGLTVLPPLLTDEMIAQYTSALLAGTITCGWTFGAGPCLQIPFAMQMAYRFNGIGVTQNVLYENQKLIANQFNSAIGKIQDSLSSTPSALGKLQDVVNQNAQALNTLVKQLSSNFGAISSVLNDILSRLDKVEAEVQIDRLITGRLQSLQTYVTQQLIRAAEIRASANLAATKMSECVLGQSKRVDFCGKGYHLMSFPQSAPHGVVFLHVTYVPAQEKNFTTAPAICHDGKAHFPREGVFVSNGTHWFVTQRNFYEPQIITTDNTFVSGNCDVVIGIVNNTVYDPLQPELDSFKEELDKYFKNHTSPDVDLGDISGINASVVNIQKEIDRLNEVAKNLNESLIDLQELGKYEQGSGYIPEAPRDGQAYVRKDGEWVLLSTFLGRSLEVLFQGPGSLPETGGGSDYKDDDDKGGGGSGGGGSGGGGSGGGGSGGGGSHHHHHH

SEQ ID NO: 76 - protein, 1297 aa, Artificial Sequence
  SEQ ID NO:2 + A942P + A892P + N532P + G880C + F888C
MFVFLVLLPLVSSQCVNLTTRTQLPPAYTNSFTRGVYYPDKVFRSSVLHSTQDLFLPFFSNVTWFHAIHVSGTNGTKRFDNPVLPFNDGVYFASTEKSNIIRGWIFGTTLDSKTQSLLIVNNATNVVIKVCEFQFCNDPFLGVYYHKNNKSWMESEFRVYSSANNCTFEYVSQPFLMDLEGKQGNFKNLREFVFKNIDGYFKIYSKHTPINLVRDLPQGFSALEPLVDLPIGINITRFQTLLALHRSYLTPGDSSSGWTAGAAAYYVGYLQPRTFLLKYNENGTITDAVDCALDPLSETKCTLKSFTVEKGIYQTSNFRVQPTESIVRFPNITNLCPFGEVFNATRFASVYAWNRKRISNCVADYSVLYNSASFSTFKCYGVSPTKLNDLCFTNVYADSFVIRGDEVRQIAPGQTGKIADYNYKLPDDFTGCVIAWNSNNLDSKVGGNYNYLYRLFRKSNLKPFERDISTEIYQAGSTPCNGVEGFNCYFPLQSYGFQPTNGVGYQPYRVVVLSFELLHAPATVCGPKKSTPLVKNKCVNFNFNGLTGTGVLTESNKKFLPFQQFGRDIADTTDAVRDPQTLEILDITPCSFGGVSVITPGTNTSNQVAVLYQDVNCTEVPVAIHADQLTPTWRVYSTGSNVFQTRAGCLIGAEHVNNSYECDIPIGAGICASYQTQTNSPSRAGSVASQSIIAYTMSLGAENSVAYSNNSIAIPTNFTISVTTEILPVSMTKTSVDCTMYICGDSTECSNLLLQYGSFCTQLNRALTGIAVEQDKNTQEVFAQVKQIYKTPPIKDFGGFNFSQILPDPSKPSKRSFIEDLLFNKVTLADAGFIKQYGDCLGDIAARDLICAQKFNGLTVLPPLLTDEMIAQYTSALLACTITSGWTCGAGPALQIPFAMQMAYRFNGIGVTQNVLYENQKLIANQFNSAIGKIQDSLSSTPSALGKLQDVVNQNAQALNTLVKQLSSNFGAISSVLNDILSRLDKVEAEVQIDRLITGRLQSLQTYVTQQLIRAAEIRASANLAATKMSECVLGQSKRVDFCGKGYHLMSFPQSAPHGVVFLHVTYVPAQEKNFTTAPAICHDGKAHFPREGVFVSNGTHWFVTQRNFYEPQIITTDNTFVSGNCDVVIGIVNNTVYDPLQPELDSFKEELDKYFKNHTSPDVDLGDISGINASVVNIQKEIDRLNEVAKNLNESLIDLQELGKYEQGSGYIPEAPRDGQAYVRKDGEWVLLSTFLGRSLEVLFQGPGSLPETGGGSDYKDDDDKGGGGSGGGGSGGGGSGGGGSGGGGSHHHHHH

SEQ ID NO: 77 - protein, 1297 aa, Artificial Sequence
  SEQ ID NO:2 + A942P + A892P + N532P + S884C + A893C
MFVFLVLLPLVSSQCVNLTTRTQLPPAYTNSFTRGVYYPDKVFRSSVLHSTQDLFLPFFSNVTWFHAIHVSGTNGTKRFDNPVLPFNDGVYFASTEKSNIIRGWIFGTTLDSKTQSLLIVNNATNVVIKVCEFQFCNDPFLGVYYHKNNKSWMESEFRVYSSANNCTFEYVSQPFLMDLEGKQGNFKNLREFVFKNIDGYFKIYSKHTPINLVRDLPQGFSALEPLVDLPIGINITRFQTLLALHRSYLTPGDSSSGWTAGAAAYYVGYLQPRTFLLKYNENGTITDAVDCALDPLSETKCTLKSFTVEKGIYQTSNFRVQPTESIVRFPNITNLCPFGEVFNATRFASVYAWNRKRISNCVADYSVLYNSASFSTFKCYGVSPTKLNDLCFTNVYADSFVIRGDEVRQIAPGQTGKIADYNYKLPDDFTGCVIAWNSNNLDSKVGGNYNYLYRLFRKSNLKPFERDISTEIYQAGSTPCNGVEGFNCYFPLQSYGFQPTNGVGYQPYRVVVLSFELLHAPATVCGPKKSTPLVKNKCVNFNFNGLTGTGVLTESNKKFLPFQQFGRDIADTTDAVRDPQTLEILDITPCSFGGVSVITPGTNTSNQVAVLYQDVNCTEVPVAIHADQLTPTWRVYSTGSNVFQTRAGCLIGAEHVNNSYECDIPIGAGICASYQTQTNSPSRAGSVASQSIIAYTMSLGAENSVAYSNNSIAIPTNFTISVTTEILPVSMTKTSVDCTMYICGDSTECSNLLLQYGSFCTQLNRALTGIAVEQDKNTQEVFAQVKQIYKTPPIKDFGGFNFSQILPDPSKPSKRSFIEDLLFNKVTLADAGFIKQYGDCLGDIAARDLICAQKFNGLTVLPPLLTDEMIAQYTSALLAGTITCGWTFGAGPCLQIPFAMQMAYRFNGIGVTQNVLYENQKLIANQFNSAIGKIQDSLSSTPSALGKLQDVVNQNAQALNTLVKQLSSNFGAISSVLNDILSRLDKVEAEVQIDRLITGRLQSLQTYVTQQLIRAAEIRASANLAATKMSECVLGQSKRVDFCGKGYHLMSFPQSAPHGVVFLHVTYVPAQEKNFTTAPAICHDGKAHFPREGVFVSNGTHWFVTQRNFYEPQIITTDNTFVSGNCDVVIGIVNNTVYDPLQPELDSFKEELDKYFKNHTSPDVDLGDISGINASVVNIQKEIDRLNEVAKNLNESLIDLQELGKYEQGSGYIPEAPRDGQAYVRKDGEWVLLSTFLGRSLEVLFQGPGSLPETGGGSDYKDDDDKGGGGSGGGGSGGGGSGGGGSGGGGSHHHHHH

SEQ ID NO: 78 - protein, 1297 aa, Artificial Sequence
  SEQ ID NO:2 + A942P + D614N + T572I + N532P
MFVFLVLLPLVSSQCVNLTTRTQLPPAYTNSFTRGVYYPDKVFRSSVLHSTQDLFLPFFSNVTWFHAIHVSGTNGTKRFDNPVLPFNDGVYFASTEKSNIIRGWIFGTTLDSKTQSLLIVNNATNVVIKVCEFQFCNDPFLGVYYHKNNKSWMESEFRVYSSANNCTFEYVSQPFLMDLEGKQGNFKNLREFVFKNIDGYFKIYSKHTPINLVRDLPQGFSALEPLVDLPIGINITRFQTLLALHRSYLTPGDSSSGWTAGAAAYYVGYLQPRTFLLKYNENGTITDAVDCALDPLSETKCTLKSFTVEKGIYQTSNFRVQPTESIVRFPNITNLCPFGEVFNATRFASVYAWNRKRISNCVADYSVLYNSASFSTFKCYGVSPTKLNDLCFTNVYADSFVIRGDEVRQIAPGQTGKIADYNYKLPDDFTGCVIAWNSNNLDSKVGGNYNYLYRLFRKSNLKPFERDISTEIYQAGSTPCNGVEGFNCYFPLQSYGFQPTNGVGYQPYRVVVLSFELLHAPATVCGPKKSTPLVKNKCVNFNFNGLTGTGVLTESNKKFLPFQQFGRDIADITDAVRDPQTLEILDITPCSFGGVSVITPGTNTSNQVAVLYQNVNCTEVPVAIHADQLTPTWRVYSTGSNVFQTRAGCLIGAEHVNNSYECDIPIGAGICASYQTQTNSPSRAGSVASQSIIAYTMSLGAENSVAYSNNSIAIPTNFTISVTTEILPVSMTKTSVDCTMYICGDSTECSNLLLQYGSFCTQLNRALTGIAVEQDKNTQEVFAQVKQIYKTPPIKDFGGFNFSQILPDPSKPSKRSFIEDLLFNKVTLADAGFIKQYGDCLGDIAARDLICAQKFNGLTVLPPLLTDEMIAQYTSALLAGTITSGWTFGAGAALQIPFAMQMAYRFNGIGVTQNVLYENQKLIANQFNSAIGKIQDSLSSTPSALGKLQDVVNQNAQALNTLVKQLSSNFGAISSVLNDILSRLDKVEAEVQIDRLITGRLQSLQTYVTQQLIRAAEIRASANLAATKMSECVLGQSKRVDFCGKGYHLMSFPQSAPHGVVFLHVTYVPAQEKNFTTAPAICHDGKAHFPREGVFVSNGTHWFVTQRNFYEPQIITTDNTFVSGNCDVVIGIVNNTVYDPLQPELDSFKEELDKYFKNHTSPDVDLGDISGINASVVNIQKEIDRLNEVAKNLNESLIDLQELGKYEQGSGYIPEAPRDGQAYVRKDGEWVLLSTFLGRSLEVLFQGPGSLPETGGGSDYKDDDDKGGGGSGGGGSGGGGSGGGGSGGGGSHHHHHH

SEQ ID NO: 79 - protein, 1297 aa, Artificial Sequence
  SEQ ID NO:2 + A942P + D614N + T572I + G880C + F888C
MFVFLVLLPLVSSQCVNLTTRTQLPPAYTNSFTRGVYYPDKVFRSSVLHSTQDLFLPFFSNVTWFHAIHVSGTNGTKRFDNPVLPFNDGVYFASTEKSNIIRGWIFGTTLDSKTQSLLIVNNATNVVIKVCEFQFCNDPFLGVYYHKNNKSWMESEFRVYSSANNCTFEYVSQPFLMDLEGKQGNFKNLREFVFKNIDGYFKIYSKHTPINLVRDLPQGFSALEPLVDLPIGINITRFQTLLALHRSYLTPGDSSSGWTAGAAAYYVGYLQPRTFLLKYNENGTITDAVDCALDPLSETKCTLKSFTVEKGIYQTSNFRVQPTESIVRFPNITNLCPFGEVFNATRFASVYAWNRKRISNCVADYSVLYNSASFSTFKCYGVSPTKLNDLCFTNVYADSFVIRGDEVRQIAPGQTGKIADYNYKLPDDFTGCVIAWNSNNLDSKVGGNYNYLYRLFRKSNLKPFERDISTEIYQAGSTPCNGVEGFNCYFPLQSYGFQPTNGVGYQPYRVVVLSFELLHAPATVCGPKKSTNLVKNKCVNFNFNGLTGTGVLTESNKKFLPFQQFGRDIADITDAVRDPQTLEILDITPCSFGGVSVITPGTNTSNQVAVLYQNVNCTEVPVAIHADQLTPTWRVYSTGSNVFQTRAGCLIGAEHVNNSYECDIPIGAGICASYQTQTNSPSRAGSVASQSIIAYTMSLGAENSVAYSNNSIAIPTNFTISVTTEILPVSMTKTSVDCTMYICGDSTECSNLLLQYGSFCTQLNRALTGIAVEQDKNTQEVFAQVKQIYKTPPIKDFGGFNFSQILPDPSKPSKRSFIEDLLFNKVTLADAGFIKQYGDCLGDIAARDLICAQKFNGLTVLPPLLTDEMIAQYTSALLACTITSGWTCGAGAALQIPFAMQMAYRFNGIGVTQNVLYENQKLIANQFNSAIGKIQDSLSSTPSALGKLQDVVNQNAQALNTLVKQLSSNFGAISSVLNDILSRLDKVEAEVQIDRLITGRLQSLQTYVTQQLIRAAEIRASANLAATKMSECVLGQSKRVDFCGKGYHLMSFPQSAPHGVVFLHVTYVPAQEKNFTTAPAICHDGKAHFPREGVFVSNGTHWFVTQRNFYEPQIITTDNTFVSGNCDVVIGIVNNTVYDPLQPELDSFKEELDKYFKNHTSPDVDLGDISGINASVVNIQKEIDRLNEVAKNLNESLIDLQELGKYEQGSGYIPEAPRDGQAYVRKDGEWVLLSTFLGRSLEVLFQGPGSLPETGGGSDYKDDDDKGGGGSGGGGSGGGGSGGGGSGGGGSHHHHHH

SEQ ID NO: 80 - protein, 1297 aa, Artificial Sequence
  SEQ ID NO:2 + A942P + D614N + T572I + S884C + A893C
MFVFLVLLPLVSSQCVNLTTRTQLPPAYTNSFTRGVYYPDKVFRSSVLHSTQDLFLPFFSNVTWFHAIHVSGTNGTKRFDNPVLPFNDGVYFASTEKSNIIRGWIFGTTLDSKTQSLLIVNNATNVVIKVCEFQFCNDPFLGVYYHKNNKSWMESEFRVYSSANNCTFEYVSQPFLMDLEGKQGNFKNLREFVFKNIDGYFKIYSKHTPINLVRDLPQGFSALEPLVDLPIGINITRFQTLLALHRSYLTPGDSSSGWTAGAAAYYVGYLQPRTFLLKYNENGTITDAVDCALDPLSETKCTLKSFTVEKGIYQTSNFRVQPTESIVRFPNITNLCPFGEVFNATRFASVYAWNRKRISNCVADYSVLYNSASFSTFKCYGVSPTKLNDLCFTNVYADSFVIRGDEVRQIAPGQTGKIADYNYKLPDDFTGCVIAWNSNNLDSKVGGNYNYLYRLFRKSNLKPFERDISTEIYQAGSTPCNGVEGFNCYFPLQSYGFQPTNGVGYQPYRVVVLSFELLHAPATVCGPKKSTNLVKNKCVNFNFNGLTGTGVLTESNKKFLPFQQFGRDIADITDAVRDPQTLEILDITPCSFGGVSVITPGTNTSNQVAVLYQNVNCTEVPVAIHADQLTPTWRVYSTGSNVFQTRAGCLIGAEHVNNSYECDIPIGAGICASYQTQTNSPSRAGSVASQSIIAYTMSLGAENSVAYSNNSIAIPTNFTISVTTEILPVSMTKTSVDCTMYICGDSTECSNLLLQYGSFCTQLNRALTGIAVEQDKNTQEVFAQVKQIYKTPPIKDFGGFNFSQILPDPSKPSKRSFIEDLLFNKVTLADAGFIKQYGDCLGDIAARDLICAQKFNGLTVLPPLLTDEMIAQYTSALLAGTITCGWTFGAGACLQIPFAMQMAYRFNGIGVTQNVLYENQKLIANQFNSAIGKIQDSLSSTPSALGKLQDVVNQNAQALNTLVKQLSSNFGAISSVLNDILSRLDKVEAEVQIDRLITGRLQSLQTYVTQQLIRAAEIRASANLAATKMSECVLGQSKRVDFCGKGYHLMSFPQSAPHGVVFLHVTYVPAQEKNFTTAPAICHDGKAHFPREGVFVSNGTHWFVTQRNFYEPQIITTDNTFVSGNCDVVIGIVNNTVYDPLQPELDSFKEELDKYFKNHTSPDVDLGDISGINASVVNIQKEIDRLNEVAKNLNESLIDLQELGKYEQGSGYIPEAPRDGQAYVRKDGEWVLLSTFLGRSLEVLFQGPGSLPETGGGSDYKDDDDKGGGGSGGGGSGGGGSGGGGSGGGGSHHHHHH

SEQ ID NO: 81 - protein, 1297 aa, Artificial Sequence
  SEQ ID NO:2 + A942P + D614N + N532P + G880C + F888C
MFVFLVLLPLVSSQCVNLTTRTQLPPAYTNSFTRGVYYPDKVFRSSVLHSTQDLFLPFFSNVTWFHAIHVSGTNGTKRFDNPVLPFNDGVYFASTEKSNIIRGWIFGTTLDSKTQSLLIVNNATNVVIKVCEFQFCNDPFLGVYYHKNNKSWMESEFRVYSSANNCTFEYVSQPFLMDLEGKQGNFKNLREFVFKNIDGYFKIYSKHTPINLVRDLPQGFSALEPLVDLPIGINITRFQTLLALHRSYLTPGDSSSGWTAGAAAYYVGYLQPRTFLLKYNENGTITDAVDCALDPLSETKCTLKSFTVEKGIYQTSNFRVQPTESIVRFPNITNLCPFGEVFNATRFASVYAWNRKRISNCVADYSVLYNSASFSTFKCYGVSPTKLNDLCFTNVYADSFVIRGDEVRQIAPGQTGKIADYNYKLPDDFTGCVIAWNSNNLDSKVGGNYNYLYRLFRKSNLKPFERDISTEIYQAGSTPCNGVEGFNCYFPLQSYGFQPTNGVGYQPYRVVVLSFELLHAPATVCGPKKSTPLVKNKCVNFNFNGLTGTGVLTESNKKFLPFQQFGRDIADTTDAVRDPQTLEILDITPCSFGGVSVITPGTNTSNQVAVLYQNVNCTEVPVAIHADQLTPTWRVYSTGSNVFQTRAGCLIGAEHVNNSYECDIPIGAGICASYQTQTNSPSRAGSVASQSIIAYTMSLGAENSVAYSNNSIAIPTNFTISVTTEILPVSMTKTSVDCTMYICGDSTECSNLLLQYGSFCTQLNRALTGIAVEQDKNTQEVFAQVKQIYKTPPIKDFGGFNFSQILPDPSKPSKRSFIEDLLFNKVTLADAGFIKQYGDCLGDIAARDLICAQKFNGLTVLPPLLTDEMIAQYTSALLACTITSGWTCGAGAALQIPFAMQMAYRFNGIGVTQNVLYENQKLIANQFNSAIGKIQDSLSSTPSALGKLQDVVNQNAQALNTLVKQLSSNFGAISSVLNDILSRLDKVEAEVQIDRLITGRLQSLQTYVTQQLIRAAEIRASANLAATKMSECVLGQSKRVDFCGKGYHLMSFPQSAPHGVVFLHVTYVPAQEKNFTTAPAICHDGKAHFPREGVFVSNGTHWFVTQRNFYEPQIITTDNTFVSGNCDVVIGIVNNTVYDPLQPELDSFKEELDKYFKNHTSPDVDLGDISGINASVVNIQKEIDRLNEVAKNLNESLIDLQELGKYEQGSGYIPEAPRDGQAYVRKDGEWVLLSTFLGRSLEVLFQGPGSLPETGGGSDYKDDDDKGGGGSGGGGSGGGGSGGGGSGGGGSHHHHHH

SEQ ID NO: 82 - protein, 1297 aa, Artificial Sequence
  SEQ ID NO:2 + A942P + D614N + N532P + S884C + A893C
MFVFLVLLPLVSSQCVNLTTRTQLPPAYTNSFTRGVYYPDKVFRSSVLHSTQDLFLPFFSNVTWFHAIHVSGTNGTKRFDNPVLPFNDGVYFASTEKSNIIRGWIFGTTLDSKTQSLLIVNNATNVVIKVCEFQFCNDPFLGVYYHKNNKSWMESEFRVYSSANNCTFEYVSQPFLMDLEGKQGNFKNLREFVFKNIDGYFKIYSKHTPINLVRDLPQGFSALEPLVDLPIGINITRFQTLLALHRSYLTPGDSSSGWTAGAAAYYVGYLQPRTFLLKYNENGTITDAVDCALDPLSETKCTLKSFTVEKGIYQTSNFRVQPTESIVRFPNITNLCPFGEVFNATRFASVYAWNRKRISNCVADYSVLYNSASFSTFKCYGVSPTKLNDLCFTNVYADSFVIRGDEVRQIAPGQTGKIADYNYKLPDDFTGCVIAWNSNNLDSKVGGNYNYLYRLFRKSNLKPFERDISTEIYQAGSTPCNGVEGFNCYFPLQSYGFQPTNGVGYQPYRVVVLSFELLHAPATVCGPKKSTPLVKNKCVNFNFNGLTGTGVLTESNKKFLPFQQFGRDIADTTDAVRDPQTLEILDITPCSFGGVSVITPGTNTSNQVAVLYQNVNCTEVPVAIHADQLTPTWRVYSTGSNVFQTRAGCLIGAEHVNNSYECDIPIGAGICASYQTQTNSPSRAGSVASQSIIAYTMSLGAENSVAYSNNSIAIPTNFTISVTTEILPVSMTKTSVDCTMYICGDSTECSNLLLQYGSFCTQLNRALTGIAVEQDKNTQEVFAQVKQIYKTPPIKDFGGFNFSQILPDPSKPSKRSFIEDLLFNKVTLADAGFIKQYGDCLGDIAARDLICAQKFNGLTVLPPLLTDEMIAQYTSALLAGTITCGWTFGAGACLQIPFAMQMAYRFNGIGVTQNVLYENQKLIANQFNSAIGKIQDSLSSTPSALGKLQDVVNQNAQALNTLVKQLSSNFGAISSVLNDILSRLDKVEAEVQIDRLITGRLQSLQTYVTQQLIRAAEIRASANLAATKMSECVLGQSKRVDFCGKGYHLMSFPQSAPHGVVFLHVTYVPAQEKNFTTAPAICHDGKAHFPREGVFVSNGTHWFVTQRNFYEPQIITTDNTFVSGNCDVVIGIVNNTVYDPLQPELDSFKEELDKYFKNHTSPDVDLGDISGINASVVNIQKEIDRLNEVAKNLNESLIDLQELGKYEQGSGYIPEAPRDGQAYVRKDGEWVLLSTFLGRSLEVLFQGPGSLPETGGGSDYKDDDDKGGGGSGGGGSGGGGSGGGGSGGGGSHHHHHH

SEQ ID NO: 83 - protein, 1297 aa, Artificial Sequence
  SEQ ID NO:2 + A942P + T572I + N532P + G880C + F888C
MFVFLVLLPLVSSQCVNLTTRTQLPPAYTNSFTRGVYYPDKVFRSSVLHSTQDLFLPFFSNVTWFHAIHVSGTNGTKRFDNPVLPFNDGVYFASTEKSNIIRGWIFGTTLDSKTQSLLIVNNATNVVIKVCEFQFCNDPFLGVYYHKNNKSWMESEFRVYSSANNCTFEYVSQPFLMDLEGKQGNFKNLREFVFKNIDGYFKIYSKHTPINLVRDLPQGFSALEPLVDLPIGINITRFQTLLALHRSYLTPGDSSSGWTAGAAAYYVGYLQPRTFLLKYNENGTITDAVDCALDPLSETKCTLKSFTVEKGIYQTSNFRVQPTESIVRFPNITNLCPFGEVFNATRFASVYAWNRKRISNCVADYSVLYNSASFSTFKCYGVSPTKLNDLCFTNVYADSFVIRGDEVRQIAPGQTGKIADYNYKLPDDFTGCVIAWNSNNLDSKVGGNYNYLYRLFRKSNLKPFERDISTEIYQAGSTPCNGVEGFNCYFPLQSYGFQPTNGVGYQPYRVVVLSFELLHAPATVCGPKKSTPLVKNKCVNFNFNGLTGTGVLTESNKKFLPFQQFGRDIADITDAVRDPQTLEILDITPCSFGGVSVITPGTNTSNQVAVLYQDVNCTEVPVAIHADQLTPTWRVYSTGSNVFQTRAGCLIGAEHVNNSYECDIPIGAGICASYQTQTNSPSRAGSVASQSIIAYTMSLGAENSVAYSNNSIAIPTNFTISVTTEILPVSMTKTSVDCTMYICGDSTECSNLLLQYGSFCTQLNRALTGIAVEQDKNTQEVFAQVKQIYKTPPIKDFGGFNFSQILPDPSKPSKRSFIEDLLFNKVTLADAGFIKQYGDCLGDIAARDLICAQKFNGLTVLPPLLTDEMIAQYTSALLACTITSGWTCGAGAALQIPFAMQMAYRFNGIGVTQNVLYENQKLIANQFNSAIGKIQDSLSSTPSALGKLQDVVNQNAQALNTLVKQLSSNFGAISSVLNDILSRLDKVEAEVQIDRLITGRLQSLQTYVTQQLIRAAEIRASANLAATKMSECVLGQSKRVDFCGKGYHLMSFPQSAPHGVVFLHVTYVPAQEKNFTTAPAICHDGKAHFPREGVFVSNGTHWFVTQRNFYEPQIITTDNTFVSGNCDVVIGIVNNTVYDPLQPELDSFKEELDKYFKNHTSPDVDLGDISGINASVVNIQKEIDRLNEVAKNLNESLIDLQELGKYEQGSGYIPEAPRDGQAYVRKDGEWVLLSTFLGRSLEVLFQGPGSLPETGGGSDYKDDDDKGGGGSGGGGSGGGGSGGGGSGGGGSHHHHHH

SEQ ID NO: 84 - protein, 1297 aa, Artificial Sequence
  SEQ ID NO:2 + A942P + T572I + N532P + S884C + A893C
MFVFLVLLPLVSSQCVNLTTRTQLPPAYTNSFTRGVYYPDKVFRSSVLHSTQDLFLPFFSNVTWFHAIHVSGTNGTKRFDNPVLPFNDGVYFASTEKSNIIRGWIFGTTLDSKTQSLLIVNNATNVVIKVCEFQFCNDPFLGVYYHKNNKSWMESEFRVYSSANNCTFEYVSQPFLMDLEGKQGNFKNLREFVFKNIDGYFKIYSKHTPINLVRDLPQGFSALEPLVDLPIGINITRFQTLLALHRSYLTPGDSSSGWTAGAAAYYVGYLQPRTFLLKYNENGTITDAVDCALDPLSETKCTLKSFTVEKGIYQTSNFRVQPTESIVRFPNITNLCPFGEVFNATRFASVYAWNRKRISNCVADYSVLYNSASFSTFKCYGVSPTKLNDLCFTNVYADSFVIRGDEVRQIAPGQTGKIADYNYKLPDDFTGCVIAWNSNNLDSKVGGNYNYLYRLFRKSNLKPFERDISTEIYQAGSTPCNGVEGFNCYFPLQSYGFQPTNGVGYQPYRVVVLSFELLHAPATVCGPKKSTPLVKNKCVNFNFNGLTGTGVLTESNKKFLPFQQFGRDIADITDAVRDPQTLEILDITPCSFGGVSVITPGTNTSNQVAVLYQDVNCTEVPVAIHADQLTPTWRVYSTGSNVFQTRAGCLIGAEHVNNSYECDIPIGAGICASYQTQTNSPSRAGSVASQSIIAYTMSLGAENSVAYSNNSIAIPTNFTISVTTEILPVSMTKTSVDCTMYICGDSTECSNLLLQYGSFCTQLNRALTGIAVEQDKNTQEVFAQVKQIYKTPPIKDFGGFNFSQILPDPSKPSKRSFIEDLLFNKVTLADAGFIKQYGDCLGDIAARDLICAQKFNGLTVLPPLLTDEMIAQYTSALLAGTITCGWTFGAGACLQIPFAMQMAYRFNGIGVTQNVLYENQKLIANQFNSAIGKIQDSLSSTPSALGKLQDVVNQNAQALNTLVKQLSSNFGAISSVLNDILSRLDKVEAEVQIDRLITGRLQSLQTYVTQQLIRAAEIRASANLAATKMSECVLGQSKRVDFCGKGYHLMSFPQSAPHGVVFLHVTYVPAQEKNFTTAPAICHDGKAHFPREGVFVSNGTHWFVTQRNFYEPQIITTDNTFVSGNCDVVIGIVNNTVYDPLQPELDSFKEELDKYFKNHTSPDVDLGDISGINASVVNIQKEIDRLNEVAKNLNESLIDLQELGKYEQGSGYIPEAPRDGQAYVRKDGEWVLLSTFLGRSLEVLFQGPGSLPETGGGSDYKDDDDKGGGGSGGGGSGGGGSGGGGSGGGGSHHHHHH

SEQ ID NO: 85 - protein, 1297 aa, Artificial Sequence
  SEQ ID NO:2 + A892P + D614N + T572I + N532P
MFVFLVLLPLVSSQCVNLTTRTQLPPAYTNSFTRGVYYPDKVFRSSVLHSTQDLFLPFFSNVTWFHAIHVSGTNGTKRFDNPVLPFNDGVYFASTEKSNIIRGWIFGTTLDSKTQSLLIVNNATNVVIKVCEFQFCNDPFLGVYYHKNNKSWMESEFRVYSSANNCTFEYVSQPFLMDLEGKQGNFKNLREFVFKNIDGYFKIYSKHTPINLVRDLPQGFSALEPLVDLPIGINITRFQTLLALHRSYLTPGDSSSGWTAGAAAYYVGYLQPRTFLLKYNENGTITDAVDCALDPLSETKCTLKSFTVEKGIYQTSNFRVQPTESIVRFPNITNLCPFGEVFNATRFASVYAWNRKRISNCVADYSVLYNSASFSTFKCYGVSPTKLNDLCFTNVYADSFVIRGDEVRQIAPGQTGKIADYNYKLPDDFTGCVIAWNSNNLDSKVGGNYNYLYRLFRKSNLKPFERDISTEIYQAGSTPCNGVEGFNCYFPLQSYGFQPTNGVGYQPYRVVVLSFELLHAPATVCGPKKSTPLVKNKCVNFNFNGLTGTGVLTESNKKFLPFQQFGRDIADITDAVRDPQTLEILDITPCSFGGVSVITPGTNTSNQVAVLYQNVNCTEVPVAIHADQLTPTWRVYSTGSNVFQTRAGCLIGAEHVNNSYECDIPIGAGICASYQTQTNSPSRAGSVASQSIIAYTMSLGAENSVAYSNNSIAIPTNFTISVTTEILPVSMTKTSVDCTMYICGDSTECSNLLLQYGSFCTQLNRALTGIAVEQDKNTQEVFAQVKQIYKTPPIKDFGGFNFSQILPDPSKPSKRSFIEDLLFNKVTLADAGFIKQYGDCLGDIAARDLICAQKFNGLTVLPPLLTDEMIAQYTSALLAGTITSGWTFGAGPALQIPFAMQMAYRFNGIGVTQNVLYENQKLIANQFNSAIGKIQDSLSSTASALGKLQDVVNQNAQALNTLVKQLSSNFGAISSVLNDILSRLDKVEAEVQIDRLITGRLQSLQTYVTQQLIRAAEIRASANLAATKMSECVLGQSKRVDFCGKGYHLMSFPQSAPHGVVFLHVTYVPAQEKNFTTAPAICHDGKAHFPREGVFVSNGTHWFVTQRNFYEPQIITTDNTFVSGNCDVVIGIVNNTVYDPLQPELDSFKEELDKYFKNHTSPDVDLGDISGINASVVNIQKEIDRLNEVAKNLNESLIDLQELGKYEQGSGYIPEAPRDGQAYVRKDGEWVLLSTFLGRSLEVLFQGPGSLPETGGGSDYKDDDDKGGGGSGGGGSGGGGSGGGGSGGGGSHHHHHH

SEQ ID NO: 86 - protein, 1297 aa, Artificial Sequence
  SEQ ID NO:2 + A892P + D614N + T572I + G880C + F888C
MFVFLVLLPLVSSQCVNLTTRTQLPPAYTNSFTRGVYYPDKVFRSSVLHSTQDLFLPFFSNVTWFHAIHVSGTNGTKRFDNPVLPFNDGVYFASTEKSNIIRGWIFGTTLDSKTQSLLIVNNATNVVIKVCEFQFCNDPFLGVYYHKNNKSWMESEFRVYSSANNCTFEYVSQPFLMDLEGKQGNFKNLREFVFKNIDGYFKIYSKHTPINLVRDLPQGFSALEPLVDLPIGINITRFQTLLALHRSYLTPGDSSSGWTAGAAAYYVGYLQPRTFLLKYNENGTITDAVDCALDPLSETKCTLKSFTVEKGIYQTSNFRVQPTESIVRFPNITNLCPFGEVFNATRFASVYAWNRKRISNCVADYSVLYNSASFSTFKCYGVSPTKLNDLCFTNVYADSFVIRGDEVRQIAPGQTGKIADYNYKLPDDFTGCVIAWNSNNLDSKVGGNYNYLYRLFRKSNLKPFERDISTEIYQAGSTPCNGVEGFNCYFPLQSYGFQPTNGVGYQPYRVVVLSFELLHAPATVCGPKKSTNLVKNKCVNFNFNGLTGTGVLTESNKKFLPFQQFGRDIADITDAVRDPQTLEILDITPCSFGGVSVITPGTNTSNQVAVLYQNVNCTEVPVAIHADQLTPTWRVYSTGSNVFQTRAGCLIGAEHVNNSYECDIPIGAGICASYQTQTNSPSRAGSVASQSIIAYTMSLGAENSVAYSNNSIAIPTNFTISVTTEILPVSMTKTSVDCTMYICGDSTECSNLLLQYGSFCTQLNRALTGIAVEQDKNTQEVFAQVKQIYKTPPIKDFGGFNFSQILPDPSKPSKRSFIEDLLFNKVTLADAGFIKQYGDCLGDIAARDLICAQKFNGLTVLPPLLTDEMIAQYTSALLACTITSGWTCGAGPALQIPFAMQMAYRFNGIGVTQNVLYENQKLIANQFNSAIGKIQDSLSSTASALGKLQDVVNQNAQALNTLVKQLSSNFGAISSVLNDILSRLDKVEAEVQIDRLITGRLQSLQTYVTQQLIRAAEIRASANLAATKMSECVLGQSKRVDFCGKGYHLMSFPQSAPHGVVFLHVTYVPAQEKNFTTAPAICHDGKAHFPREGVFVSNGTHWFVTQRNFYEPQIITTDNTFVSGNCDVVIGIVNNTVYDPLQPELDSFKEELDKYFKNHTSPDVDLGDISGINASVVNIQKEIDRLNEVAKNLNESLIDLQELGKYEQGSGYIPEAPRDGQAYVRKDGEWVLLSTFLGRSLEVLFQGPGSLPETGGGSDYKDDDDKGGGGSGGGGSGGGGSGGGGSGGGGSHHHHHH

SEQ ID NO: 87 - protein, 1297 aa, Artificial Sequence
  SEQ ID NO:2 + A892P + D614N + T572I + S884C + A893C
MFVFLVLLPLVSSQCVNLTTRTQLPPAYTNSFTRGVYYPDKVFRSSVLHSTQDLFLPFFSNVTWFHAIHVSGTNGTKRFDNPVLPFNDGVYFASTEKSNIIRGWIFGTTLDSKTQSLLIVNNATNVVIKVCEFQFCNDPFLGVYYHKNNKSWMESEFRVYSSANNCTFEYVSQPFLMDLEGKQGNFKNLREFVFKNIDGYFKIYSKHTPINLVRDLPQGFSALEPLVDLPIGINITRFQTLLALHRSYLTPGDSSSGWTAGAAAYYVGYLQPRTFLLKYNENGTITDAVDCALDPLSETKCTLKSFTVEKGIYQTSNFRVQPTESIVRFPNITNLCPFGEVFNATRFASVYAWNRKRISNCVADYSVLYNSASFSTFKCYGVSPTKLNDLCFTNVYADSFVIRGDEVRQIAPGQTGKIADYNYKLPDDFTGCVIAWNSNNLDSKVGGNYNYLYRLFRKSNLKPFERDISTEIYQAGSTPCNGVEGFNCYFPLQSYGFQPTNGVGYQPYRVVVLSFELLHAPATVCGPKKSTNLVKNKCVNFNFNGLTGTGVLTESNKKFLPFQQFGRDIADITDAVRDPQTLEILDITPCSFGGVSVITPGTNTSNQVAVLYQNVNCTEVPVAIHADQLTPTWRVYSTGSNVFQTRAGCLIGAEHVNNSYECDIPIGAGICASYQTQTNSPSRAGSVASQSIIAYTMSLGAENSVAYSNNSIAIPTNFTISVTTEILPVSMTKTSVDCTMYICGDSTECSNLLLQYGSFCTQLNRALTGIAVEQDKNTQEVFAQVKQIYKTPPIKDFGGFNFSQILPDPSKPSKRSFIEDLLFNKVTLADAGFIKQYGDCLGDIAARDLICAQKFNGLTVLPPLLTDEMIAQYTSALLAGTITCGWTFGAGPCLQIPFAMQMAYRFNGIGVTQNVLYENQKLIANQFNSAIGKIQDSLSSTASALGKLQDVVNQNAQALNTLVKQLSSNFGAISSVLNDILSRLDKVEAEVQIDRLITGRLQSLQTYVTQQLIRAAEIRASANLAATKMSECVLGQSKRVDFCGKGYHLMSFPQSAPHGVVFLHVTYVPAQEKNFTTAPAICHDGKAHFPREGVFVSNGTHWFVTQRNFYEPQIITTDNTFVSGNCDVVIGIVNNTVYDPLQPELDSFKEELDKYFKNHTSPDVDLGDISGINASVVNIQKEIDRLNEVAKNLNESLIDLQELGKYEQGSGYIPEAPRDGQAYVRKDGEWVLLSTFLGRSLEVLFQGPGSLPETGGGSDYKDDDDKGGGGSGGGGSGGGGSGGGGSGGGGSHHHHHH

SEQ ID NO: 88 - protein, 1297 aa, Artificial Sequence
  SEQ ID NO:2 + A892P + D614N + N532P +G880C + F888C
MFVFLVLLPLVSSQCVNLTTRTQLPPAYTNSFTRGVYYPDKVFRSSVLHSTQDLFLPFFSNVTWFHAIHVSGTNGTKRFDNPVLPFNDGVYFASTEKSNIIRGWIFGTTLDSKTQSLLIVNNATNVVIKVCEFQFCNDPFLGVYYHKNNKSWMESEFRVYSSANNCTFEYVSQPFLMDLEGKQGNFKNLREFVFKNIDGYFKIYSKHTPINLVRDLPQGFSALEPLVDLPIGINITRFQTLLALHRSYLTPGDSSSGWTAGAAAYYVGYLQPRTFLLKYNENGTITDAVDCALDPLSETKCTLKSFTVEKGIYQTSNFRVQPTESIVRFPNITNLCPFGEVFNATRFASVYAWNRKRISNCVADYSVLYNSASFSTFKCYGVSPTKLNDLCFTNVYADSFVIRGDEVRQIAPGQTGKIADYNYKLPDDFTGCVIAWNSNNLDSKVGGNYNYLYRLFRKSNLKPFERDISTEIYQAGSTPCNGVEGFNCYFPLQSYGFQPTNGVGYQPYRVVVLSFELLHAPATVCGPKKSTPLVKNKCVNFNFNGLTGTGVLTESNKKFLPFQQFGRDIADTTDAVRDPQTLEILDITPCSFGGVSVITPGTNTSNQVAVLYQNVNCTEVPVAIHADQLTPTWRVYSTGSNVFQTRAGCLIGAEHVNNSYECDIPIGAGICASYQTQTNSPSRAGSVASQSIIAYTMSLGAENSVAYSNNSIAIPTNFTISVTTEILPVSMTKTSVDCTMYICGDSTECSNLLLQYGSFCTQLNRALTGIAVEQDKNTQEVFAQVKQIYKTPPIKDFGGFNFSQILPDPSKPSKRSFIEDLLFNKVTLADAGFIKQYGDCLGDIAARDLICAQKFNGLTVLPPLLTDEMIAQYTSALLACTITSGWTCGAGPALQIPFAMQMAYRFNGIGVTQNVLYENQKLIANQFNSAIGKIQDSLSSTASALGKLQDVVNQNAQALNTLVKQLSSNFGAISSVLNDILSRLDKVEAEVQIDRLITGRLQSLQTYVTQQLIRAAEIRASANLAATKMSECVLGQSKRVDFCGKGYHLMSFPQSAPHGVVFLHVTYVPAQEKNFTTAPAICHDGKAHFPREGVFVSNGTHWFVTQRNFYEPQIITTDNTFVSGNCDVVIGIVNNTVYDPLQPELDSFKEELDKYFKNHTSPDVDLGDISGINASVVNIQKEIDRLNEVAKNLNESLIDLQELGKYEQGSGYIPEAPRDGQAYVRKDGEWVLLSTFLGRSLEVLFQGPGSLPETGGGSDYKDDDDKGGGGSGGGGSGGGGSGGGGSGGGGSHHHHHH

SEQ ID NO: 89 - protein, 1297 aa, Artificial Sequence
  SEQ ID NO:2 + A892P + D614N + N532P + S884C + A893C
MFVFLVLLPLVSSQCVNLTTRTQLPPAYTNSFTRGVYYPDKVFRSSVLHSTQDLFLPFFSNVTWFHAIHVSGTNGTKRFDNPVLPFNDGVYFASTEKSNIIRGWIFGTTLDSKTQSLLIVNNATNVVIKVCEFQFCNDPFLGVYYHKNNKSWMESEFRVYSSANNCTFEYVSQPFLMDLEGKQGNFKNLREFVFKNIDGYFKIYSKHTPINLVRDLPQGFSALEPLVDLPIGINITRFQTLLALHRSYLTPGDSSSGWTAGAAAYYVGYLQPRTFLLKYNENGTITDAVDCALDPLSETKCTLKSFTVEKGIYQTSNFRVQPTESIVRFPNITNLCPFGEVFNATRFASVYAWNRKRISNCVADYSVLYNSASFSTFKCYGVSPTKLNDLCFTNVYADSFVIRGDEVRQIAPGQTGKIADYNYKLPDDFTGCVIAWNSNNLDSKVGGNYNYLYRLFRKSNLKPFERDISTEIYQAGSTPCNGVEGFNCYFPLQSYGFQPTNGVGYQPYRVVVLSFELLHAPATVCGPKKSTPLVKNKCVNFNFNGLTGTGVLTESNKKFLPFQQFGRDIADTTDAVRDPQTLEILDITPCSFGGVSVITPGTNTSNQVAVLYQNVNCTEVPVAIHADQLTPTWRVYSTGSNVFQTRAGCLIGAEHVNNSYECDIPIGAGICASYQTQTNSPSRAGSVASQSIIAYTMSLGAENSVAYSNNSIAIPTNFTISVTTEILPVSMTKTSVDCTMYICGDSTECSNLLLQYGSFCTQLNRALTGIAVEQDKNTQEVFAQVKQIYKTPPIKDFGGFNFSQILPDPSKPSKRSFIEDLLFNKVTLADAGFIKQYGDCLGDIAARDLICAQKFNGLTVLPPLLTDEMIAQYTSALLAGTITCGWTFGAGPCLQIPFAMQMAYRFNGIGVTQNVLYENQKLIANQFNSAIGKIQDSLSSTASALGKLQDVVNQNAQALNTLVKQLSSNFGAISSVLNDILSRLDKVEAEVQIDRLITGRLQSLQTYVTQQLIRAAEIRASANLAATKMSECVLGQSKRVDFCGKGYHLMSFPQSAPHGVVFLHVTYVPAQEKNFTTAPAICHDGKAHFPREGVFVSNGTHWFVTQRNFYEPQIITTDNTFVSGNCDVVIGIVNNTVYDPLQPELDSFKEELDKYFKNHTSPDVDLGDISGINASVVNIQKEIDRLNEVAKNLNESLIDLQELGKYEQGSGYIPEAPRDGQAYVRKDGEWVLLSTFLGRSLEVLFQGPGSLPETGGGSDYKDDDDKGGGGSGGGGSGGGGSGGGGSGGGGSHHHHHH

SEQ ID NO: 90 - protein, 1297 aa, Artificial Sequence
  SEQ ID NO:2 + A892P + T572I + N532P + G880C + F888C
MFVFLVLLPLVSSQCVNLTTRTQLPPAYTNSFTRGVYYPDKVFRSSVLHSTQDLFLPFFSNVTWFHAIHVSGTNGTKRFDNPVLPFNDGVYFASTEKSNIIRGWIFGTTLDSKTQSLLIVNNATNVVIKVCEFQFCNDPFLGVYYHKNNKSWMESEFRVYSSANNCTFEYVSQPFLMDLEGKQGNFKNLREFVFKNIDGYFKIYSKHTPINLVRDLPQGFSALEPLVDLPIGINITRFQTLLALHRSYLTPGDSSSGWTAGAAAYYVGYLQPRTFLLKYNENGTITDAVDCALDPLSETKCTLKSFTVEKGIYQTSNFRVQPTESIVRFPNITNLCPFGEVFNATRFASVYAWNRKRISNCVADYSVLYNSASFSTFKCYGVSPTKLNDLCFTNVYADSFVIRGDEVRQIAPGQTGKIADYNYKLPDDFTGCVIAWNSNNLDSKVGGNYNYLYRLFRKSNLKPFERDISTEIYQAGSTPCNGVEGFNCYFPLQSYGFQPTNGVGYQPYRVVVLSFELLHAPATVCGPKKSTPLVKNKCVNFNFNGLTGTGVLTESNKKFLPFQQFGRDIADITDAVRDPQTLEILDITPCSFGGVSVITPGTNTSNQVAVLYQDVNCTEVPVAIHADQLTPTWRVYSTGSNVFQTRAGCLIGAEHVNNSYECDIPIGAGICASYQTQTNSPSRAGSVASQSIIAYTMSLGAENSVAYSNNSIAIPTNFTISVTTEILPVSMTKTSVDCTMYICGDSTECSNLLLQYGSFCTQLNRALTGIAVEQDKNTQEVFAQVKQIYKTPPIKDFGGFNFSQILPDPSKPSKRSFIEDLLFNKVTLADAGFIKQYGDCLGDIAARDLICAQKFNGLTVLPPLLTDEMIAQYTSALLACTITSGWTCGAGPALQIPFAMQMAYRFNGIGVTQNVLYENQKLIANQFNSAIGKIQDSLSSTASALGKLQDVVNQNAQALNTLVKQLSSNFGAISSVLNDILSRLDKVEAEVQIDRLITGRLQSLQTYVTQQLIRAAEIRASANLAATKMSECVLGQSKRVDFCGKGYHLMSFPQSAPHGVVFLHVTYVPAQEKNFTTAPAICHDGKAHFPREGVFVSNGTHWFVTQRNFYEPQIITTDNTFVSGNCDVVIGIVNNTVYDPLQPELDSFKEELDKYFKNHTSPDVDLGDISGINASVVNIQKEIDRLNEVAKNLNESLIDLQELGKYEQGSGYIPEAPRDGQAYVRKDGEWVLLSTFLGRSLEVLFQGPGSLPETGGGSDYKDDDDKGGGGSGGGGSGGGGSGGGGSGGGGSHHHHHH

SEQ ID NO: 91 - protein, 1297 aa, Artificial Sequence
  SEQ ID NO:2 + A892P + T572I + N532P + S884C + A893C
MFVFLVLLPLVSSQCVNLTTRTQLPPAYTNSFTRGVYYPDKVFRSSVLHSTQDLFLPFFSNVTWFHAIHVSGTNGTKRFDNPVLPFNDGVYFASTEKSNIIRGWIFGTTLDSKTQSLLIVNNATNVVIKVCEFQFCNDPFLGVYYHKNNKSWMESEFRVYSSANNCTFEYVSQPFLMDLEGKQGNFKNLREFVFKNIDGYFKIYSKHTPINLVRDLPQGFSALEPLVDLPIGINITRFQTLLALHRSYLTPGDSSSGWTAGAAAYYVGYLQPRTFLLKYNENGTITDAVDCALDPLSETKCTLKSFTVEKGIYQTSNFRVQPTESIVRFPNITNLCPFGEVFNATRFASVYAWNRKRISNCVADYSVLYNSASFSTFKCYGVSPTKLNDLCFTNVYADSFVIRGDEVRQIAPGQTGKIADYNYKLPDDFTGCVIAWNSNNLDSKVGGNYNYLYRLFRKSNLKPFERDISTEIYQAGSTPCNGVEGFNCYFPLQSYGFQPTNGVGYQPYRVVVLSFELLHAPATVCGPKKSTPLVKNKCVNFNFNGLTGTGVLTESNKKFLPFQQFGRDIADITDAVRDPQTLEILDITPCSFGGVSVITPGTNTSNQVAVLYQDVNCTEVPVAIHADQLTPTWRVYSTGSNVFQTRAGCLIGAEHVNNSYECDIPIGAGICASYQTQTNSPSRAGSVASQSIIAYTMSLGAENSVAYSNNSIAIPTNFTISVTTEILPVSMTKTSVDCTMYICGDSTECSNLLLQYGSFCTQLNRALTGIAVEQDKNTQEVFAQVKQIYKTPPIKDFGGFNFSQILPDPSKPSKRSFIEDLLFNKVTLADAGFIKQYGDCLGDIAARDLICAQKFNGLTVLPPLLTDEMIAQYTSALLAGTITCGWTFGAGPCLQIPFAMQMAYRFNGIGVTQNVLYENQKLIANQFNSAIGKIQDSLSSTASALGKLQDVVNQNAQALNTLVKQLSSNFGAISSVLNDILSRLDKVEAEVQIDRLITGRLQSLQTYVTQQLIRAAEIRASANLAATKMSECVLGQSKRVDFCGKGYHLMSFPQSAPHGVVFLHVTYVPAQEKNFTTAPAICHDGKAHFPREGVFVSNGTHWFVTQRNFYEPQIITTDNTFVSGNCDVVIGIVNNTVYDPLQPELDSFKEELDKYFKNHTSPDVDLGDISGINASVVNIQKEIDRLNEVAKNLNESLIDLQELGKYEQGSGYIPEAPRDGQAYVRKDGEWVLLSTFLGRSLEVLFQGPGSLPETGGGSDYKDDDDKGGGGSGGGGSGGGGSGGGGSGGGGSHHHHHH

SEQ ID NO: 92 - protein, 1297 aa, Artificial Sequence
  SEQ ID NO:2 + D614N + T572I + N532P + G880C + F888C
MFVFLVLLPLVSSQCVNLTTRTQLPPAYTNSFTRGVYYPDKVFRSSVLHSTQDLFLPFFSNVTWFHAIHVSGTNGTKRFDNPVLPFNDGVYFASTEKSNIIRGWIFGTTLDSKTQSLLIVNNATNVVIKVCEFQFCNDPFLGVYYHKNNKSWMESEFRVYSSANNCTFEYVSQPFLMDLEGKQGNFKNLREFVFKNIDGYFKIYSKHTPINLVRDLPQGFSALEPLVDLPIGINITRFQTLLALHRSYLTPGDSSSGWTAGAAAYYVGYLQPRTFLLKYNENGTITDAVDCALDPLSETKCTLKSFTVEKGIYQTSNFRVQPTESIVRFPNITNLCPFGEVFNATRFASVYAWNRKRISNCVADYSVLYNSASFSTFKCYGVSPTKLNDLCFTNVYADSFVIRGDEVRQIAPGQTGKIADYNYKLPDDFTGCVIAWNSNNLDSKVGGNYNYLYRLFRKSNLKPFERDISTEIYQAGSTPCNGVEGFNCYFPLQSYGFQPTNGVGYQPYRVVVLSFELLHAPATVCGPKKSTPLVKNKCVNFNFNGLTGTGVLTESNKKFLPFQQFGRDIADITDAVRDPQTLEILDITPCSFGGVSVITPGTNTSNQVAVLYQNVNCTEVPVAIHADQLTPTWRVYSTGSNVFQTRAGCLIGAEHVNNSYECDIPIGAGICASYQTQTNSPSRAGSVASQSIIAYTMSLGAENSVAYSNNSIAIPTNFTISVTTEILPVSMTKTSVDCTMYICGDSTECSNLLLQYGSFCTQLNRALTGIAVEQDKNTQEVFAQVKQIYKTPPIKDFGGFNFSQILPDPSKPSKRSFIEDLLFNKVTLADAGFIKQYGDCLGDIAARDLICAQKFNGLTVLPPLLTDEMIAQYTSALLACTITSGWTCGAGAALQIPFAMQMAYRFNGIGVTQNVLYENQKLIANQFNSAIGKIQDSLSSTASALGKLQDVVNQNAQALNTLVKQLSSNFGAISSVLNDILSRLDKVEAEVQIDRLITGRLQSLQTYVTQQLIRAAEIRASANLAATKMSECVLGQSKRVDFCGKGYHLMSFPQSAPHGVVFLHVTYVPAQEKNFTTAPAICHDGKAHFPREGVFVSNGTHWFVTQRNFYEPQIITTDNTFVSGNCDVVIGIVNNTVYDPLQPELDSFKEELDKYFKNHTSPDVDLGDISGINASVVNIQKEIDRLNEVAKNLNESLIDLQELGKYEQGSGYIPEAPRDGQAYVRKDGEWVLLSTFLGRSLEVLFQGPGSLPETGGGSDYKDDDDKGGGGSGGGGSGGGGSGGGGSGGGGSHHHHHH

SEQ ID NO: 93 - protein, 1297 aa, Artificial Sequence
  SEQ ID NO:2 + D614N + T572I + N532P + S884C + A893C
MFVFLVLLPLVSSQCVNLTTRTQLPPAYTNSFTRGVYYPDKVFRSSVLHSTQDLFLPFFSNVTWFHAIHVSGTNGTKRFDNPVLPFNDGVYFASTEKSNIIRGWIFGTTLDSKTQSLLIVNNATNVVIKVCEFQFCNDPFLGVYYHKNNKSWMESEFRVYSSANNCTFEYVSQPFLMDLEGKQGNFKNLREFVFKNIDGYFKIYSKHTPINLVRDLPQGFSALEPLVDLPIGINITRFQTLLALHRSYLTPGDSSSGWTAGAAAYYVGYLQPRTFLLKYNENGTITDAVDCALDPLSETKCTLKSFTVEKGIYQTSNFRVQPTESIVRFPNITNLCPFGEVFNATRFASVYAWNRKRISNCVADYSVLYNSASFSTFKCYGVSPTKLNDLCFTNVYADSFVIRGDEVRQIAPGQTGKIADYNYKLPDDFTGCVIAWNSNNLDSKVGGNYNYLYRLFRKSNLKPFERDISTEIYQAGSTPCNGVEGFNCYFPLQSYGFQPTNGVGYQPYRVVVLSFELLHAPATVCGPKKSTPLVKNKCVNFNFNGLTGTGVLTESNKKFLPFQQFGRDIADITDAVRDPQTLEILDITPCSFGGVSVITPGTNTSNQVAVLYQNVNCTEVPVAIHADQLTPTWRVYSTGSNVFQTRAGCLIGAEHVNNSYECDIPIGAGICASYQTQTNSPSRAGSVASQSIIAYTMSLGAENSVAYSNNSIAIPTNFTISVTTEILPVSMTKTSVDCTMYICGDSTECSNLLLQYGSFCTQLNRALTGIAVEQDKNTQEVFAQVKQIYKTPPIKDFGGFNFSQILPDPSKPSKRSFIEDLLFNKVTLADAGFIKQYGDCLGDIAARDLICAQKFNGLTVLPPLLTDEMIAQYTSALLAGTITCGWTFGAGACLQIPFAMQMAYRFNGIGVTQNVLYENQKLIANQFNSAIGKIQDSLSSTASALGKLQDVVNQNAQALNTLVKQLSSNFGAISSVLNDILSRLDKVEAEVQIDRLITGRLQSLQTYVTQQLIRAAEIRASANLAATKMSECVLGQSKRVDFCGKGYHLMSFPQSAPHGVVFLHVTYVPAQEKNFTTAPAICHDGKAHFPREGVFVSNGTHWFVTQRNFYEPQIITTDNTFVSGNCDVVIGIVNNTVYDPLQPELDSFKEELDKYFKNHTSPDVDLGDISGINASVVNIQKEIDRLNEVAKNLNESLIDLQELGKYEQGSGYIPEAPRDGQAYVRKDGEWVLLSTFLGRSLEVLFQGPGSLPETGGGSDYKDDDDKGGGGSGGGGSGGGGSGGGGSGGGGSHHHHHH

SEQ ID NO: 94 - protein, 1297 aa, Artificial Sequence
  SEQ ID NO:2 + A942P + A892P + D614N + T572I + N532P
MFVFLVLLPLVSSQCVNLTTRTQLPPAYTNSFTRGVYYPDKVFRSSVLHSTQDLFLPFFSNVTWFHAIHVSGTNGTKRFDNPVLPFNDGVYFASTEKSNIIRGWIFGTTLDSKTQSLLIVNNATNVVIKVCEFQFCNDPFLGVYYHKNNKSWMESEFRVYSSANNCTFEYVSQPFLMDLEGKQGNFKNLREFVFKNIDGYFKIYSKHTPINLVRDLPQGFSALEPLVDLPIGINITRFQTLLALHRSYLTPGDSSSGWTAGAAAYYVGYLQPRTFLLKYNENGTITDAVDCALDPLSETKCTLKSFTVEKGIYQTSNFRVQPTESIVRFPNITNLCPFGEVFNATRFASVYAWNRKRISNCVADYSVLYNSASFSTFKCYGVSPTKLNDLCFTNVYADSFVIRGDEVRQIAPGQTGKIADYNYKLPDDFTGCVIAWNSNNLDSKVGGNYNYLYRLFRKSNLKPFERDISTEIYQAGSTPCNGVEGFNCYFPLQSYGFQPTNGVGYQPYRVVVLSFELLHAPATVCGPKKSTPLVKNKCVNFNFNGLTGTGVLTESNKKFLPFQQFGRDIADITDAVRDPQTLEILDITPCSFGGVSVITPGTNTSNQVAVLYQNVNCTEVPVAIHADQLTPTWRVYSTGSNVFQTRAGCLIGAEHVNNSYECDIPIGAGICASYQTQTNSPSRAGSVASQSIIAYTMSLGAENSVAYSNNSIAIPTNFTISVTTEILPVSMTKTSVDCTMYICGDSTECSNLLLQYGSFCTQLNRALTGIAVEQDKNTQEVFAQVKQIYKTPPIKDFGGFNFSQILPDPSKPSKRSFIEDLLFNKVTLADAGFIKQYGDCLGDIAARDLICAQKFNGLTVLPPLLTDEMIAQYTSALLAGTITSGWTFGAGPALQIPFAMQMAYRFNGIGVTQNVLYENQKLIANQFNSAIGKIQDSLSSTPSALGKLQDVVNQNAQALNTLVKQLSSNFGAISSVLNDILSRLDKVEAEVQIDRLITGRLQSLQTYVTQQLIRAAEIRASANLAATKMSECVLGQSKRVDFCGKGYHLMSFPQSAPHGVVFLHVTYVPAQEKNFTTAPAICHDGKAHFPREGVFVSNGTHWFVTQRNFYEPQIITTDNTFVSGNCDVVIGIVNNTVYDPLQPELDSFKEELDKYFKNHTSPDVDLGDISGINASVVNIQKEIDRLNEVAKNLNESLIDLQELGKYEQGSGYIPEAPRDGQAYVRKDGEWVLLSTFLGRSLEVLFQGPGSLPETGGGSDYKDDDDKGGGGSGGGGSGGGGSGGGGSGGGGSHHHHHH

SEQ ID NO: 95 - protein, 1297 aa, Artificial Sequence
  SEQ ID NO:2 + A942P + A892P + D614N + T572I + G880C + F888C
MFVFLVLLPLVSSQCVNLTTRTQLPPAYTNSFTRGVYYPDKVFRSSVLHSTQDLFLPFFSNVTWFHAIHVSGTNGTKRFDNPVLPFNDGVYFASTEKSNIIRGWIFGTTLDSKTQSLLIVNNATNVVIKVCEFQFCNDPFLGVYYHKNNKSWMESEFRVYSSANNCTFEYVSQPFLMDLEGKQGNFKNLREFVFKNIDGYFKIYSKHTPINLVRDLPQGFSALEPLVDLPIGINITRFQTLLALHRSYLTPGDSSSGWTAGAAAYYVGYLQPRTFLLKYNENGTITDAVDCALDPLSETKCTLKSFTVEKGIYQTSNFRVQPTESIVRFPNITNLCPFGEVFNATRFASVYAWNRKRISNCVADYSVLYNSASFSTFKCYGVSPTKLNDLCFTNVYADSFVIRGDEVRQIAPGQTGKIADYNYKLPDDFTGCVIAWNSNNLDSKVGGNYNYLYRLFRKSNLKPFERDISTEIYQAGSTPCNGVEGFNCYFPLQSYGFQPTNGVGYQPYRVVVLSFELLHAPATVCGPKKSTNLVKNKCVNFNFNGLTGTGVLTESNKKFLPFQQFGRDIADITDAVRDPQTLEILDITPCSFGGVSVITPGTNTSNQVAVLYQNVNCTEVPVAIHADQLTPTWRVYSTGSNVFQTRAGCLIGAEHVNNSYECDIPIGAGICASYQTQTNSPSRAGSVASQSIIAYTMSLGAENSVAYSNNSIAIPTNFTISVTTEILPVSMTKTSVDCTMYICGDSTECSNLLLQYGSFCTQLNRALTGIAVEQDKNTQEVFAQVKQIYKTPPIKDFGGFNFSQILPDPSKPSKRSFIEDLLFNKVTLADAGFIKQYGDCLGDIAARDLICAQKFNGLTVLPPLLTDEMIAQYTSALLACTITSGWTCGAGPALQIPFAMQMAYRFNGIGVTQNVLYENQKLIANQFNSAIGKIQDSLSSTPSALGKLQDVVNQNAQALNTLVKQLSSNFGAISSVLNDILSRLDKVEAEVQIDRLITGRLQSLQTYVTQQLIRAAEIRASANLAATKMSECVLGQSKRVDFCGKGYHLMSFPQSAPHGVVFLHVTYVPAQEKNFTTAPAICHDGKAHFPREGVFVSNGTHWFVTQRNFYEPQIITTDNTFVSGNCDVVIGIVNNTVYDPLQPELDSFKEELDKYFKNHTSPDVDLGDISGINASVVNIQKEIDRLNEVAKNLNESLIDLQELGKYEQGSGYIPEAPRDGQAYVRKDGEWVLLSTFLGRSLEVLFQGPGSLPETGGGSDYKDDDDKGGGGSGGGGSGGGGSGGGGSGGGGSHHHHHH

SEQ ID NO: 96 - protein, 1297 aa, Artificial Sequence
  SEQ ID NO:2 + A942P + A892P + D614N + T572I + S884C + A893C
MFVFLVLLPLVSSQCVNLTTRTQLPPAYTNSFTRGVYYPDKVFRSSVLHSTQDLFLPFFSNVTWFHAIHVSGTNGTKRFDNPVLPFNDGVYFASTEKSNIIRGWIFGTTLDSKTQSLLIVNNATNVVIKVCEFQFCNDPFLGVYYHKNNKSWMESEFRVYSSANNCTFEYVSQPFLMDLEGKQGNFKNLREFVFKNIDGYFKIYSKHTPINLVRDLPQGFSALEPLVDLPIGINITRFQTLLALHRSYLTPGDSSSGWTAGAAAYYVGYLQPRTFLLKYNENGTITDAVDCALDPLSETKCTLKSFTVEKGIYQTSNFRVQPTESIVRFPNITNLCPFGEVFNATRFASVYAWNRKRISNCVADYSVLYNSASFSTFKCYGVSPTKLNDLCFTNVYADSFVIRGDEVRQIAPGQTGKIADYNYKLPDDFTGCVIAWNSNNLDSKVGGNYNYLYRLFRKSNLKPFERDISTEIYQAGSTPCNGVEGFNCYFPLQSYGFQPTNGVGYQPYRVVVLSFELLHAPATVCGPKKSTNLVKNKCVNFNFNGLTGTGVLTESNKKFLPFQQFGRDIADITDAVRDPQTLEILDITPCSFGGVSVITPGTNTSNQVAVLYQNVNCTEVPVAIHADQLTPTWRVYSTGSNVFQTRAGCLIGAEHVNNSYECDIPIGAGICASYQTQTNSPSRAGSVASQSIIAYTMSLGAENSVAYSNNSIAIPTNFTISVTTEILPVSMTKTSVDCTMYICGDSTECSNLLLQYGSFCTQLNRALTGIAVEQDKNTQEVFAQVKQIYKTPPIKDFGGFNFSQILPDPSKPSKRSFIEDLLFNKVTLADAGFIKQYGDCLGDIAARDLICAQKFNGLTVLPPLLTDEMIAQYTSALLAGTITCGWTFGAGPCLQIPFAMQMAYRFNGIGVTQNVLYENQKLIANQFNSAIGKIQDSLSSTPSALGKLQDVVNQNAQALNTLVKQLSSNFGAISSVLNDILSRLDKVEAEVQIDRLITGRLQSLQTYVTQQLIRAAEIRASANLAATKMSECVLGQSKRVDFCGKGYHLMSFPQSAPHGVVFLHVTYVPAQEKNFTTAPAICHDGKAHFPREGVFVSNGTHWFVTQRNFYEPQIITTDNTFVSGNCDVVIGIVNNTVYDPLQPELDSFKEELDKYFKNHTSPDVDLGDISGINASVVNIQKEIDRLNEVAKNLNESLIDLQELGKYEQGSGYIPEAPRDGQAYVRKDGEWVLLSTFLGRSLEVLFQGPGSLPETGGGSDYKDDDDKGGGGSGGGGSGGGGSGGGGSGGGGSHHHHHH

SEQ ID NO: 97 - protein, 1297 aa, Artificial Sequence
  SEQ ID NO:2 + A942P + A892P + D614N + N532P + G880C + F888C
MFVFLVLLPLVSSQCVNLTTRTQLPPAYTNSFTRGVYYPDKVFRSSVLHSTQDLFLPFFSNVTWFHAIHVSGTNGTKRFDNPVLPFNDGVYFASTEKSNIIRGWIFGTTLDSKTQSLLIVNNATNVVIKVCEFQFCNDPFLGVYYHKNNKSWMESEFRVYSSANNCTFEYVSQPFLMDLEGKQGNFKNLREFVFKNIDGYFKIYSKHTPINLVRDLPQGFSALEPLVDLPIGINITRFQTLLALHRSYLTPGDSSSGWTAGAAAYYVGYLQPRTFLLKYNENGTITDAVDCALDPLSETKCTLKSFTVEKGIYQTSNFRVQPTESIVRFPNITNLCPFGEVFNATRFASVYAWNRKRISNCVADYSVLYNSASFSTFKCYGVSPTKLNDLCFTNVYADSFVIRGDEVRQIAPGQTGKIADYNYKLPDDFTGCVIAWNSNNLDSKVGGNYNYLYRLFRKSNLKPFERDISTEIYQAGSTPCNGVEGFNCYFPLQSYGFQPTNGVGYQPYRVVVLSFELLHAPATVCGPKKSTPLVKNKCVNFNFNGLTGTGVLTESNKKFLPFQQFGRDIADTTDAVRDPQTLEILDITPCSFGGVSVITPGTNTSNQVAVLYQNVNCTEVPVAIHADQLTPTWRVYSTGSNVFQTRAGCLIGAEHVNNSYECDIPIGAGICASYQTQTNSPSRAGSVASQSIIAYTMSLGAENSVAYSNNSIAIPTNFTISVTTEILPVSMTKTSVDCTMYICGDSTECSNLLLQYGSFCTQLNRALTGIAVEQDKNTQEVFAQVKQIYKTPPIKDFGGFNFSQILPDPSKPSKRSFIEDLLFNKVTLADAGFIKQYGDCLGDIAARDLICAQKFNGLTVLPPLLTDEMIAQYTSALLACTITSGWTCGAGPALQIPFAMQMAYRFNGIGVTQNVLYENQKLIANQFNSAIGKIQDSLSSTPSALGKLQDVVNQNAQALNTLVKQLSSNFGAISSVLNDILSRLDKVEAEVQIDRLITGRLQSLQTYVTQQLIRAAEIRASANLAATKMSECVLGQSKRVDFCGKGYHLMSFPQSAPHGVVFLHVTYVPAQEKNFTTAPAICHDGKAHFPREGVFVSNGTHWFVTQRNFYEPQIITTDNTFVSGNCDVVIGIVNNTVYDPLQPELDSFKEELDKYFKNHTSPDVDLGDISGINASVVNIQKEIDRLNEVAKNLNESLIDLQELGKYEQGSGYIPEAPRDGQAYVRKDGEWVLLSTFLGRSLEVLFQGPGSLPETGGGSDYKDDDDKGGGGSGGGGSGGGGSGGGGSGGGGSHHHHHH

SEQ ID NO: 98 - protein, 1297 aa, Artificial Sequence
  SEQ ID NO:2 + A942P + A892P + D614N + N532P + S884C + A893C
MFVFLVLLPLVSSQCVNLTTRTQLPPAYTNSFTRGVYYPDKVFRSSVLHSTQDLFLPFFSNVTWFHAIHVSGTNGTKRFDNPVLPFNDGVYFASTEKSNIIRGWIFGTTLDSKTQSLLIVNNATNVVIKVCEFQFCNDPFLGVYYHKNNKSWMESEFRVYSSANNCTFEYVSQPFLMDLEGKQGNFKNLREFVFKNIDGYFKIYSKHTPINLVRDLPQGFSALEPLVDLPIGINITRFQTLLALHRSYLTPGDSSSGWTAGAAAYYVGYLQPRTFLLKYNENGTITDAVDCALDPLSETKCTLKSFTVEKGIYQTSNFRVQPTESIVRFPNITNLCPFGEVFNATRFASVYAWNRKRISNCVADYSVLYNSASFSTFKCYGVSPTKLNDLCFTNVYADSFVIRGDEVRQIAPGQTGKIADYNYKLPDDFTGCVIAWNSNNLDSKVGGNYNYLYRLFRKSNLKPFERDISTEIYQAGSTPCNGVEGFNCYFPLQSYGFQPTNGVGYQPYRVVVLSFELLHAPATVCGPKKSTPLVKNKCVNFNFNGLTGTGVLTESNKKFLPFQQFGRDIADTTDAVRDPQTLEILDITPCSFGGVSVITPGTNTSNQVAVLYQNVNCTEVPVAIHADQLTPTWRVYSTGSNVFQTRAGCLIGAEHVNNSYECDIPIGAGICASYQTQTNSPSRAGSVASQSIIAYTMSLGAENSVAYSNNSIAIPTNFTISVTTEILPVSMTKTSVDCTMYICGDSTECSNLLLQYGSFCTQLNRALTGIAVEQDKNTQEVFAQVKQIYKTPPIKDFGGFNFSQILPDPSKPSKRSFIEDLLFNKVTLADAGFIKQYGDCLGDIAARDLICAQKFNGLTVLPPLLTDEMIAQYTSALLAGTITCGWTFGAGPCLQIPFAMQMAYRFNGIGVTQNVLYENQKLIANQFNSAIGKIQDSLSSTPSALGKLQDVVNQNAQALNTLVKQLSSNFGAISSVLNDILSRLDKVEAEVQIDRLITGRLQSLQTYVTQQLIRAAEIRASANLAATKMSECVLGQSKRVDFCGKGYHLMSFPQSAPHGVVFLHVTYVPAQEKNFTTAPAICHDGKAHFPREGVFVSNGTHWFVTQRNFYEPQIITTDNTFVSGNCDVVIGIVNNTVYDPLQPELDSFKEELDKYFKNHTSPDVDLGDISGINASVVNIQKEIDRLNEVAKNLNESLIDLQELGKYEQGSGYIPEAPRDGQAYVRKDGEWVLLSTFLGRSLEVLFQGPGSLPETGGGSDYKDDDDKGGGGSGGGGSGGGGSGGGGSGGGGSHHHHHH

SEQ ID NO: 99 - protein, 1297 aa, Artificial Sequence
  SEQ ID NO:2 + A942P + A892P + T572I + N532P + G880C + F888C
MFVFLVLLPLVSSQCVNLTTRTQLPPAYTNSFTRGVYYPDKVFRSSVLHSTQDLFLPFFSNVTWFHAIHVSGTNGTKRFDNPVLPFNDGVYFASTEKSNIIRGWIFGTTLDSKTQSLLIVNNATNVVIKVCEFQFCNDPFLGVYYHKNNKSWMESEFRVYSSANNCTFEYVSQPFLMDLEGKQGNFKNLREFVFKNIDGYFKIYSKHTPINLVRDLPQGFSALEPLVDLPIGINITRFQTLLALHRSYLTPGDSSSGWTAGAAAYYVGYLQPRTFLLKYNENGTITDAVDCALDPLSETKCTLKSFTVEKGIYQTSNFRVQPTESIVRFPNITNLCPFGEVFNATRFASVYAWNRKRISNCVADYSVLYNSASFSTFKCYGVSPTKLNDLCFTNVYADSFVIRGDEVRQIAPGQTGKIADYNYKLPDDFTGCVIAWNSNNLDSKVGGNYNYLYRLFRKSNLKPFERDISTEIYQAGSTPCNGVEGFNCYFPLQSYGFQPTNGVGYQPYRVVVLSFELLHAPATVCGPKKSTPLVKNKCVNFNFNGLTGTGVLTESNKKFLPFQQFGRDIADITDAVRDPQTLEILDITPCSFGGVSVITPGTNTSNQVAVLYQDVNCTEVPVAIHADQLTPTWRVYSTGSNVFQTRAGCLIGAEHVNNSYECDIPIGAGICASYQTQTNSPSRAGSVASQSIIAYTMSLGAENSVAYSNNSIAIPTNFTISVTTEILPVSMTKTSVDCTMYICGDSTECSNLLLQYGSFCTQLNRALTGIAVEQDKNTQEVFAQVKQIYKTPPIKDFGGFNFSQILPDPSKPSKRSFIEDLLFNKVTLADAGFIKQYGDCLGDIAARDLICAQKFNGLTVLPPLLTDEMIAQYTSALLACTITSGWTCGAGPALQIPFAMQMAYRFNGIGVTQNVLYENQKLIANQFNSAIGKIQDSLSSTPSALGKLQDVVNQNAQALNTLVKQLSSNFGAISSVLNDILSRLDKVEAEVQIDRLITGRLQSLQTYVTQQLIRAAEIRASANLAATKMSECVLGQSKRVDFCGKGYHLMSFPQSAPHGVVFLHVTYVPAQEKNFTTAPAICHDGKAHFPREGVFVSNGTHWFVTQRNFYEPQIITTDNTFVSGNCDVVIGIVNNTVYDPLQPELDSFKEELDKYFKNHTSPDVDLGDISGINASVVNIQKEIDRLNEVAKNLNESLIDLQELGKYEQGSGYIPEAPRDGQAYVRKDGEWVLLSTFLGRSLEVLFQGPGSLPETGGGSDYKDDDDKGGGGSGGGGSGGGGSGGGGSGGGGSHHHHHH

SEQ ID NO: 100 - protein, 1297 aa, Artificial Sequence
  SEQ ID NO:2 + A942P + A892P + T572I + N532P + S884C + A893C
MFVFLVLLPLVSSQCVNLTTRTQLPPAYTNSFTRGVYYPDKVFRSSVLHSTQDLFLPFFSNVTWFHAIHVSGTNGTKRFDNPVLPFNDGVYFASTEKSNIIRGWIFGTTLDSKTQSLLIVNNATNVVIKVCEFQFCNDPFLGVYYHKNNKSWMESEFRVYSSANNCTFEYVSQPFLMDLEGKQGNFKNLREFVFKNIDGYFKIYSKHTPINLVRDLPQGFSALEPLVDLPIGINITRFQTLLALHRSYLTPGDSSSGWTAGAAAYYVGYLQPRTFLLKYNENGTITDAVDCALDPLSETKCTLKSFTVEKGIYQTSNFRVQPTESIVRFPNITNLCPFGEVFNATRFASVYAWNRKRISNCVADYSVLYNSASFSTFKCYGVSPTKLNDLCFTNVYADSFVIRGDEVRQIAPGQTGKIADYNYKLPDDFTGCVIAWNSNNLDSKVGGNYNYLYRLFRKSNLKPFERDISTEIYQAGSTPCNGVEGFNCYFPLQSYGFQPTNGVGYQPYRVVVLSFELLHAPATVCGPKKSTPLVKNKCVNFNFNGLTGTGVLTESNKKFLPFQQFGRDIADITDAVRDPQTLEILDITPCSFGGVSVITPGTNTSNQVAVLYQDVNCTEVPVAIHADQLTPTWRVYSTGSNVFQTRAGCLIGAEHVNNSYECDIPIGAGICASYQTQTNSPSRAGSVASQSIIAYTMSLGAENSVAYSNNSIAIPTNFTISVTTEILPVSMTKTSVDCTMYICGDSTECSNLLLQYGSFCTQLNRALTGIAVEQDKNTQEVFAQVKQIYKTPPIKDFGGFNFSQILPDPSKPSKRSFIEDLLFNKVTLADAGFIKQYGDCLGDIAARDLICAQKFNGLTVLPPLLTDEMIAQYTSALLAGTITCGWTFGAGPCLQIPFAMQMAYRFNGIGVTQNVLYENQKLIANQFNSAIGKIQDSLSSTPSALGKLQDVVNQNAQALNTLVKQLSSNFGAISSVLNDILSRLDKVEAEVQIDRLITGRLQSLQTYVTQQLIRAAEIRASANLAATKMSECVLGQSKRVDFCGKGYHLMSFPQSAPHGVVFLHVTYVPAQEKNFTTAPAICHDGKAHFPREGVFVSNGTHWFVTQRNFYEPQIITTDNTFVSGNCDVVIGIVNNTVYDPLQPELDSFKEELDKYFKNHTSPDVDLGDISGINASVVNIQKEIDRLNEVAKNLNESLIDLQELGKYEQGSGYIPEAPRDGQAYVRKDGEWVLLSTFLGRSLEVLFQGPGSLPETGGGSDYKDDDDKGGGGSGGGGSGGGGSGGGGSGGGGSHHHHHH

SEQ ID NO: 101 - protein, 1297 aa, Artificial Sequence
  SEQ ID NO:2 + A942P + D614N + T572I + N532P + G880C + F888C
MFVFLVLLPLVSSQCVNLTTRTQLPPAYTNSFTRGVYYPDKVFRSSVLHSTQDLFLPFFSNVTWFHAIHVSGTNGTKRFDNPVLPFNDGVYFASTEKSNIIRGWIFGTTLDSKTQSLLIVNNATNVVIKVCEFQFCNDPFLGVYYHKNNKSWMESEFRVYSSANNCTFEYVSQPFLMDLEGKQGNFKNLREFVFKNIDGYFKIYSKHTPINLVRDLPQGFSALEPLVDLPIGINITRFQTLLALHRSYLTPGDSSSGWTAGAAAYYVGYLQPRTFLLKYNENGTITDAVDCALDPLSETKCTLKSFTVEKGIYQTSNFRVQPTESIVRFPNITNLCPFGEVFNATRFASVYAWNRKRISNCVADYSVLYNSASFSTFKCYGVSPTKLNDLCFTNVYADSFVIRGDEVRQIAPGQTGKIADYNYKLPDDFTGCVIAWNSNNLDSKVGGNYNYLYRLFRKSNLKPFERDISTEIYQAGSTPCNGVEGFNCYFPLQSYGFQPTNGVGYQPYRVVVLSFELLHAPATVCGPKKSTPLVKNKCVNFNFNGLTGTGVLTESNKKFLPFQQFGRDIADITDAVRDPQTLEILDITPCSFGGVSVITPGTNTSNQVAVLYQNVNCTEVPVAIHADQLTPTWRVYSTGSNVFQTRAGCLIGAEHVNNSYECDIPIGAGICASYQTQTNSPSRAGSVASQSIIAYTMSLGAENSVAYSNNSIAIPTNFTISVTTEILPVSMTKTSVDCTMYICGDSTECSNLLLQYGSFCTQLNRALTGIAVEQDKNTQEVFAQVKQIYKTPPIKDFGGFNFSQILPDPSKPSKRSFIEDLLFNKVTLADAGFIKQYGDCLGDIAARDLICAQKFNGLTVLPPLLTDEMIAQYTSALLACTITSGWTCGAGAALQIPFAMQMAYRFNGIGVTQNVLYENQKLIANQFNSAIGKIQDSLSSTPSALGKLQDVVNQNAQALNTLVKQLSSNFGAISSVLNDILSRLDKVEAEVQIDRLITGRLQSLQTYVTQQLIRAAEIRASANLAATKMSECVLGQSKRVDFCGKGYHLMSFPQSAPHGVVFLHVTYVPAQEKNFTTAPAICHDGKAHFPREGVFVSNGTHWFVTQRNFYEPQIITTDNTFVSGNCDVVIGIVNNTVYDPLQPELDSFKEELDKYFKNHTSPDVDLGDISGINASVVNIQKEIDRLNEVAKNLNESLIDLQELGKYEQGSGYIPEAPRDGQAYVRKDGEWVLLSTFLGRSLEVLFQGPGSLPETGGGSDYKDDDDKGGGGSGGGGSGGGGSGGGGSGGGGSHHHHHH

SEQ ID NO: 102 - protein, 1297 aa, Artificial Sequence
  SEQ ID NO:2 + A942P + D614N + T572I + N532P + S884C + A893C
MFVFLVLLPLVSSQCVNLTTRTQLPPAYTNSFTRGVYYPDKVFRSSVLHSTQDLFLPFFSNVTWFHAIHVSGTNGTKRFDNPVLPFNDGVYFASTEKSNIIRGWIFGTTLDSKTQSLLIVNNATNVVIKVCEFQFCNDPFLGVYYHKNNKSWMESEFRVYSSANNCTFEYVSQPFLMDLEGKQGNFKNLREFVFKNIDGYFKIYSKHTPINLVRDLPQGFSALEPLVDLPIGINITRFQTLLALHRSYLTPGDSSSGWTAGAAAYYVGYLQPRTFLLKYNENGTITDAVDCALDPLSETKCTLKSFTVEKGIYQTSNFRVQPTESIVRFPNITNLCPFGEVFNATRFASVYAWNRKRISNCVADYSVLYNSASFSTFKCYGVSPTKLNDLCFTNVYADSFVIRGDEVRQIAPGQTGKIADYNYKLPDDFTGCVIAWNSNNLDSKVGGNYNYLYRLFRKSNLKPFERDISTEIYQAGSTPCNGVEGFNCYFPLQSYGFQPTNGVGYQPYRVVVLSFELLHAPATVCGPKKSTPLVKNKCVNFNFNGLTGTGVLTESNKKFLPFQQFGRDIADITDAVRDPQTLEILDITPCSFGGVSVITPGTNTSNQVAVLYQNVNCTEVPVAIHADQLTPTWRVYSTGSNVFQTRAGCLIGAEHVNNSYECDIPIGAGICASYQTQTNSPSRAGSVASQSIIAYTMSLGAENSVAYSNNSIAIPTNFTISVTTEILPVSMTKTSVDCTMYICGDSTECSNLLLQYGSFCTQLNRALTGIAVEQDKNTQEVFAQVKQIYKTPPIKDFGGFNFSQILPDPSKPSKRSFIEDLLFNKVTLADAGFIKQYGDCLGDIAARDLICAQKFNGLTVLPPLLTDEMIAQYTSALLAGTITCGWTFGAGACLQIPFAMQMAYRFNGIGVTQNVLYENQKLIANQFNSAIGKIQDSLSSTPSALGKLQDVVNQNAQALNTLVKQLSSNFGAISSVLNDILSRLDKVEAEVQIDRLITGRLQSLQTYVTQQLIRAAEIRASANLAATKMSECVLGQSKRVDFCGKGYHLMSFPQSAPHGVVFLHVTYVPAQEKNFTTAPAICHDGKAHFPREGVFVSNGTHWFVTQRNFYEPQIITTDNTFVSGNCDVVIGIVNNTVYDPLQPELDSFKEELDKYFKNHTSPDVDLGDISGINASVVNIQKEIDRLNEVAKNLNESLIDLQELGKYEQGSGYIPEAPRDGQAYVRKDGEWVLLSTFLGRSLEVLFQGPGSLPETGGGSDYKDDDDKGGGGSGGGGSGGGGSGGGGSGGGGSHHHHHH

SEQ ID NO: 103 - protein, 1297 aa, Artificial Sequence
  SEQ ID NO:2 + A892P + D614N + T572I + N532P + G880C + F888C
MFVFLVLLPLVSSQCVNLTTRTQLPPAYTNSFTRGVYYPDKVFRSSVLHSTQDLFLPFFSNVTWFHAIHVSGTNGTKRFDNPVLPFNDGVYFASTEKSNIIRGWIFGTTLDSKTQSLLIVNNATNVVIKVCEFQFCNDPFLGVYYHKNNKSWMESEFRVYSSANNCTFEYVSQPFLMDLEGKQGNFKNLREFVFKNIDGYFKIYSKHTPINLVRDLPQGFSALEPLVDLPIGINITRFQTLLALHRSYLTPGDSSSGWTAGAAAYYVGYLQPRTFLLKYNENGTITDAVDCALDPLSETKCTLKSFTVEKGIYQTSNFRVQPTESIVRFPNITNLCPFGEVFNATRFASVYAWNRKRISNCVADYSVLYNSASFSTFKCYGVSPTKLNDLCFTNVYADSFVIRGDEVRQIAPGQTGKIADYNYKLPDDFTGCVIAWNSNNLDSKVGGNYNYLYRLFRKSNLKPFERDISTEIYQAGSTPCNGVEGFNCYFPLQSYGFQPTNGVGYQPYRVVVLSFELLHAPATVCGPKKSTPLVKNKCVNFNFNGLTGTGVLTESNKKFLPFQQFGRDIADITDAVRDPQTLEILDITPCSFGGVSVITPGTNTSNQVAVLYQNVNCTEVPVAIHADQLTPTWRVYSTGSNVFQTRAGCLIGAEHVNNSYECDIPIGAGICASYQTQTNSPSRAGSVASQSIIAYTMSLGAENSVAYSNNSIAIPTNFTISVTTEILPVSMTKTSVDCTMYICGDSTECSNLLLQYGSFCTQLNRALTGIAVEQDKNTQEVFAQVKQIYKTPPIKDFGGFNFSQILPDPSKPSKRSFIEDLLFNKVTLADAGFIKQYGDCLGDIAARDLICAQKFNGLTVLPPLLTDEMIAQYTSALLACTITSGWTCGAGPALQIPFAMQMAYRFNGIGVTQNVLYENQKLIANQFNSAIGKIQDSLSSTASALGKLQDVVNQNAQALNTLVKQLSSNFGAISSVLNDILSRLDKVEAEVQIDRLITGRLQSLQTYVTQQLIRAAEIRASANLAATKMSECVLGQSKRVDFCGKGYHLMSFPQSAPHGVVFLHVTYVPAQEKNFTTAPAICHDGKAHFPREGVFVSNGTHWFVTQRNFYEPQIITTDNTFVSGNCDVVIGIVNNTVYDPLQPELDSFKEELDKYFKNHTSPDVDLGDISGINASVVNIQKEIDRLNEVAKNLNESLIDLQELGKYEQGSGYIPEAPRDGQAYVRKDGEWVLLSTFLGRSLEVLFQGPGSLPETGGGSDYKDDDDKGGGGSGGGGSGGGGSGGGGSGGGGSHHHHHH

SEQ ID NO: 104 - protein, 1297 aa, Artificial Sequence
  SEQ ID NO:2 + A892P + D614N + T572I + N532P + S884C + A893C
MFVFLVLLPLVSSQCVNLTTRTQLPPAYTNSFTRGVYYPDKVFRSSVLHSTQDLFLPFFSNVTWFHAIHVSGTNGTKRFDNPVLPFNDGVYFASTEKSNIIRGWIFGTTLDSKTQSLLIVNNATNVVIKVCEFQFCNDPFLGVYYHKNNKSWMESEFRVYSSANNCTFEYVSQPFLMDLEGKQGNFKNLREFVFKNIDGYFKIYSKHTPINLVRDLPQGFSALEPLVDLPIGINITRFQTLLALHRSYLTPGDSSSGWTAGAAAYYVGYLQPRTFLLKYNENGTITDAVDCALDPLSETKCTLKSFTVEKGIYQTSNFRVQPTESIVRFPNITNLCPFGEVFNATRFASVYAWNRKRISNCVADYSVLYNSASFSTFKCYGVSPTKLNDLCFTNVYADSFVIRGDEVRQIAPGQTGKIADYNYKLPDDFTGCVIAWNSNNLDSKVGGNYNYLYRLFRKSNLKPFERDISTEIYQAGSTPCNGVEGFNCYFPLQSYGFQPTNGVGYQPYRVVVLSFELLHAPATVCGPKKSTPLVKNKCVNFNFNGLTGTGVLTESNKKFLPFQQFGRDIADITDAVRDPQTLEILDITPCSFGGVSVITPGTNTSNQVAVLYQNVNCTEVPVAIHADQLTPTWRVYSTGSNVFQTRAGCLIGAEHVNNSYECDIPIGAGICASYQTQTNSPSRAGSVASQSIIAYTMSLGAENSVAYSNNSIAIPTNFTISVTTEILPVSMTKTSVDCTMYICGDSTECSNLLLQYGSFCTQLNRALTGIAVEQDKNTQEVFAQVKQIYKTPPIKDFGGFNFSQILPDPSKPSKRSFIEDLLFNKVTLADAGFIKQYGDCLGDIAARDLICAQKFNGLTVLPPLLTDEMIAQYTSALLAGTITCGWTFGAGPCLQIPFAMQMAYRFNGIGVTQNVLYENQKLIANQFNSAIGKIQDSLSSTASALGKLQDVVNQNAQALNTLVKQLSSNFGAISSVLNDILSRLDKVEAEVQIDRLITGRLQSLQTYVTQQLIRAAEIRASANLAATKMSECVLGQSKRVDFCGKGYHLMSFPQSAPHGVVFLHVTYVPAQEKNFTTAPAICHDGKAHFPREGVFVSNGTHWFVTQRNFYEPQIITTDNTFVSGNCDVVIGIVNNTVYDPLQPELDSFKEELDKYFKNHTSPDVDLGDISGINASVVNIQKEIDRLNEVAKNLNESLIDLQELGKYEQGSGYIPEAPRDGQAYVRKDGEWVLLSTFLGRSLEVLFQGPGSLPETGGGSDYKDDDDKGGGGSGGGGSGGGGSGGGGSGGGGSHHHHHH

SEQ ID NO: 105 - protein, 1297 aa, Artificial Sequence
  SEQ ID NO:2 + A942P + A892P + D614N + T572I + N532P + G880C + F888C
MFVFLVLLPLVSSQCVNLTTRTQLPPAYTNSFTRGVYYPDKVFRSSVLHSTQDLFLPFFSNVTWFHAIHVSGTNGTKRFDNPVLPFNDGVYFASTEKSNIIRGWIFGTTLDSKTQSLLIVNNATNVVIKVCEFQFCNDPFLGVYYHKNNKSWMESEFRVYSSANNCTFEYVSQPFLMDLEGKQGNFKNLREFVFKNIDGYFKIYSKHTPINLVRDLPQGFSALEPLVDLPIGINITRFQTLLALHRSYLTPGDSSSGWTAGAAAYYVGYLQPRTFLLKYNENGTITDAVDCALDPLSETKCTLKSFTVEKGIYQTSNFRVQPTESIVRFPNITNLCPFGEVFNATRFASVYAWNRKRISNCVADYSVLYNSASFSTFKCYGVSPTKLNDLCFTNVYADSFVIRGDEVRQIAPGQTGKIADYNYKLPDDFTGCVIAWNSNNLDSKVGGNYNYLYRLFRKSNLKPFERDISTEIYQAGSTPCNGVEGFNCYFPLQSYGFQPTNGVGYQPYRVVVLSFELLHAPATVCGPKKSTPLVKNKCVNFNFNGLTGTGVLTESNKKFLPFQQFGRDIADITDAVRDPQTLEILDITPCSFGGVSVITPGTNTSNQVAVLYQNVNCTEVPVAIHADQLTPTWRVYSTGSNVFQTRAGCLIGAEHVNNSYECDIPIGAGICASYQTQTNSPSRAGSVASQSIIAYTMSLGAENSVAYSNNSIAIPTNFTISVTTEILPVSMTKTSVDCTMYICGDSTECSNLLLQYGSFCTQLNRALTGIAVEQDKNTQEVFAQVKQIYKTPPIKDFGGFNFSQILPDPSKPSKRSFIEDLLFNKVTLADAGFIKQYGDCLGDIAARDLICAQKFNGLTVLPPLLTDEMIAQYTSALLACTITSGWTCGAGPALQIPFAMQMAYRFNGIGVTQNVLYENQKLIANQFNSAIGKIQDSLSSTPSALGKLQDVVNQNAQALNTLVKQLSSNFGAISSVLNDILSRLDKVEAEVQIDRLITGRLQSLQTYVTQQLIRAAEIRASANLAATKMSECVLGQSKRVDFCGKGYHLMSFPQSAPHGVVFLHVTYVPAQEKNFTTAPAICHDGKAHFPREGVFVSNGTHWFVTQRNFYEPQIITTDNTFVSGNCDVVIGIVNNTVYDPLQPELDSFKEELDKYFKNHTSPDVDLGDISGINASVVNIQKEIDRLNEVAKNLNESLIDLQELGKYEQGSGYIPEAPRDGQAYVRKDGEWVLLSTFLGRSLEVLFQGPGSLPETGGGSDYKDDDDKGGGGSGGGGSGGGGSGGGGSGGGGSHHHHHH

SEQ ID NO: 106 - protein, 1297 aa, Artificial Sequence
  SEQ ID NO:2 + A942P + A892P + D614N + T572I + N532P + S884C + A893C
MFVFLVLLPLVSSQCVNLTTRTQLPPAYTNSFTRGVYYPDKVFRSSVLHSTQDLFLPFFSNVTWFHAIHVSGTNGTKRFDNPVLPFNDGVYFASTEKSNIIRGWIFGTTLDSKTQSLLIVNNATNVVIKVCEFQFCNDPFLGVYYHKNNKSWMESEFRVYSSANNCTFEYVSQPFLMDLEGKQGNFKNLREFVFKNIDGYFKIYSKHTPINLVRDLPQGFSALEPLVDLPIGINITRFQTLLALHRSYLTPGDSSSGWTAGAAAYYVGYLQPRTFLLKYNENGTITDAVDCALDPLSETKCTLKSFTVEKGIYQTSNFRVQPTESIVRFPNITNLCPFGEVFNATRFASVYAWNRKRISNCVADYSVLYNSASFSTFKCYGVSPTKLNDLCFTNVYADSFVIRGDEVRQIAPGQTGKIADYNYKLPDDFTGCVIAWNSNNLDSKVGGNYNYLYRLFRKSNLKPFERDISTEIYQAGSTPCNGVEGFNCYFPLQSYGFQPTNGVGYQPYRVVVLSFELLHAPATVCGPKKSTPLVKNKCVNFNFNGLTGTGVLTESNKKFLPFQQFGRDIADITDAVRDPQTLEILDITPCSFGGVSVITPGTNTSNQVAVLYQNVNCTEVPVAIHADQLTPTWRVYSTGSNVFQTRAGCLIGAEHVNNSYECDIPIGAGICASYQTQTNSPSRAGSVASQSIIAYTMSLGAENSVAYSNNSIAIPTNFTISVTTEILPVSMTKTSVDCTMYICGDSTECSNLLLQYGSFCTQLNRALTGIAVEQDKNTQEVFAQVKQIYKTPPIKDFGGFNFSQILPDPSKPSKRSFIEDLLFNKVTLADAGFIKQYGDCLGDIAARDLICAQKFNGLTVLPPLLTDEMIAQYTSALLAGTITCGWTFGAGPCLQIPFAMQMAYRFNGIGVTQNVLYENQKLIANQFNSAIGKIQDSLSSTPSALGKLQDVVNQNAQALNTLVKQLSSNFGAISSVLNDILSRLDKVEAEVQIDRLITGRLQSLQTYVTQQLIRAAEIRASANLAATKMSECVLGQSKRVDFCGKGYHLMSFPQSAPHGVVFLHVTYVPAQEKNFTTAPAICHDGKAHFPREGVFVSNGTHWFVTQRNFYEPQIITTDNTFVSGNCDVVIGIVNNTVYDPLQPELDSFKEELDKYFKNHTSPDVDLGDISGINASVVNIQKEIDRLNEVAKNLNESLIDLQELGKYEQGSGYIPEAPRDGQAYVRKDGEWVLLSTFLGRSLEVLFQGPGSLPETGGGSDYKDDDDKGGGGSGGGGSGGGGSGGGGSGGGGSHHHHHH

SEQ ID NO: 107 - protein, 1297 aa, Artificial Sequence
  SEQ ID NO:3 + A942P + A892P
MFVFLVLLPLVSSQCVNLTTRTQLPPAYTNSFTRGVYYPDKVFRSSVLHSTQDLFLPFFSNVTWFHAIHVSGTNGTKRFDNPVLPFNDGVYFASTEKSNIIRGWIFGTTLDSKTQSLLIVNNATNVVIKVCEFQFCNDPFLGVYYHKNNKSWMESEFRVYSSANNCTFEYVSQPFLMDLEGKQGNFKNLREFVFKNIDGYFKIYSKHTPINLVRDLPQGFSALEPLVDLPIGINITRFQTLLALHRSYLTPGDSSSGWTAGAAAYYVGYLQPRTFLLKYNENGTITDAVDCALDPLSETKCTLKSFTVEKGIYQTSNFRVQPTESIVRFPNITNLCPFGEVFNATRFASVYAWNRKRISNCVADYSVLYNSASFSTFKCYGVSPTKLNDLCFTNVYADSFVIRGDEVRQIAPGQTGKIADYNYKLPDDFTGCVIAWNSNNLDSKVGGNYNYLYRLFRKSNLKPFERDISTEIYQAGSTPCNGVEGFNCYFPLQSYGFQPTNGVGYQPYRVVVLSFELLHAPATVCGPKKSTNLVKNKCVNFNFNGLTGTGVLTESNKKFLPFQQFGRDIADTTDAVRDPQTLEILDITPCSFGGVSVITPGTNTSNQVAVLYQDVNCTEVPVAIHADQLTPTWRVYSTGSNVFQTRAGCLIGAEHVNNSYECDIPIGAGICASYQTQTNSPSRAGSVASQSIIAYTMSLGAENSVAYSNNSIAIPTNFTISVTTEILPVSMTKTSVDCTMYICGDSTECSNLLLQYGSFCTQLNRALTGIAVEQDKNTQEVFAQVKQIYKTPPIKDFGGFNFSQILPDPSKPSKRSFIEDLLFNKVTLADAGFIKQYGDCLGDIAARDLICAQKFNGLTVLPPLLTDEMIAQYTSALLAGTITSGWTFGAGPALQIPFAMQMAYRFNGIGVTQNVLYENQKLIANQFNSAIGKIQDSLSSTPSALGKLQDVVNQNAQALNTLVKQLSSNFGAISSVLNDILSRLDPPEAEVQIDRLITGRLQSLQTYVTQQLIRAAEIRASANLAATKMSECVLGQSKRVDFCGKGYHLMSFPQSAPHGVVFLHVTYVPAQEKNFTTAPAICHDGKAHFPREGVFVSNGTHWFVTQRNFYEPQIITTDNTFVSGNCDVVIGIVNNTVYDPLQPELDSFKEELDKYFKNHTSPDVDLGDISGINASVVNIQKEIDRLNEVAKNLNESLIDLQELGKYEQGSGYIPEAPRDGQAYVRKDGEWVLLSTFLGRSLEVLFQGPGSLPETGGGSDYKDDDDKGGGGSGGGGSGGGGSGGGGSGGGGSHHHHHH

SEQ ID NO: 108 - protein, 1297 aa, Artificial Sequence
  SEQ ID NO:3 + A942P + D614N
MFVFLVLLPLVSSQCVNLTTRTQLPPAYTNSFTRGVYYPDKVFRSSVLHSTQDLFLPFFSNVTWFHAIHVSGTNGTKRFDNPVLPFNDGVYFASTEKSNIIRGWIFGTTLDSKTQSLLIVNNATNVVIKVCEFQFCNDPFLGVYYHKNNKSWMESEFRVYSSANNCTFEYVSQPFLMDLEGKQGNFKNLREFVFKNIDGYFKIYSKHTPINLVRDLPQGFSALEPLVDLPIGINITRFQTLLALHRSYLTPGDSSSGWTAGAAAYYVGYLQPRTFLLKYNENGTITDAVDCALDPLSETKCTLKSFTVEKGIYQTSNFRVQPTESIVRFPNITNLCPFGEVFNATRFASVYAWNRKRISNCVADYSVLYNSASFSTFKCYGVSPTKLNDLCFTNVYADSFVIRGDEVRQIAPGQTGKIADYNYKLPDDFTGCVIAWNSNNLDSKVGGNYNYLYRLFRKSNLKPFERDISTEIYQAGSTPCNGVEGFNCYFPLQSYGFQPTNGVGYQPYRVVVLSFELLHAPATVCGPKKSTNLVKNKCVNFNFNGLTGTGVLTESNKKFLPFQQFGRDIADTTDAVRDPQTLEILDITPCSFGGVSVITPGTNTSNQVAVLYQNVNCTEVPVAIHADQLTPTWRVYSTGSNVFQTRAGCLIGAEHVNNSYECDIPIGAGICASYQTQTNSPSRAGSVASQSIIAYTMSLGAENSVAYSNNSIAIPTNFTISVTTEILPVSMTKTSVDCTMYICGDSTECSNLLLQYGSFCTQLNRALTGIAVEQDKNTQEVFAQVKQIYKTPPIKDFGGFNFSQILPDPSKPSKRSFIEDLLFNKVTLADAGFIKQYGDCLGDIAARDLICAQKFNGLTVLPPLLTDEMIAQYTSALLAGTITSGWTFGAGAALQIPFAMQMAYRFNGIGVTQNVLYENQKLIANQFNSAIGKIQDSLSSTPSALGKLQDVVNQNAQALNTLVKQLSSNFGAISSVLNDILSRLDPPEAEVQIDRLITGRLQSLQTYVTQQLIRAAEIRASANLAATKMSECVLGQSKRVDFCGKGYHLMSFPQSAPHGVVFLHVTYVPAQEKNFTTAPAICHDGKAHFPREGVFVSNGTHWFVTQRNFYEPQIITTDNTFVSGNCDVVIGIVNNTVYDPLQPELDSFKEELDKYFKNHTSPDVDLGDISGINASVVNIQKEIDRLNEVAKNLNESLIDLQELGKYEQGSGYIPEAPRDGQAYVRKDGEWVLLSTFLGRSLEVLFQGPGSLPETGGGSDYKDDDDKGGGGSGGGGSGGGGSGGGGSGGGGSHHHHHH

SEQ ID NO: 109 - protein, 1297 aa, Artificial Sequence
  SEQ ID NO:3 + A942P + T572I
MFVFLVLLPLVSSQCVNLTTRTQLPPAYTNSFTRGVYYPDKVFRSSVLHSTQDLFLPFFSNVTWFHAIHVSGTNGTKRFDNPVLPFNDGVYFASTEKSNIIRGWIFGTTLDSKTQSLLIVNNATNVVIKVCEFQFCNDPFLGVYYHKNNKSWMESEFRVYSSANNCTFEYVSQPFLMDLEGKQGNFKNLREFVFKNIDGYFKIYSKHTPINLVRDLPQGFSALEPLVDLPIGINITRFQTLLALHRSYLTPGDSSSGWTAGAAAYYVGYLQPRTFLLKYNENGTITDAVDCALDPLSETKCTLKSFTVEKGIYQTSNFRVQPTESIVRFPNITNLCPFGEVFNATRFASVYAWNRKRISNCVADYSVLYNSASFSTFKCYGVSPTKLNDLCFTNVYADSFVIRGDEVRQIAPGQTGKIADYNYKLPDDFTGCVIAWNSNNLDSKVGGNYNYLYRLFRKSNLKPFERDISTEIYQAGSTPCNGVEGFNCYFPLQSYGFQPTNGVGYQPYRVVVLSFELLHAPATVCGPKKSTNLVKNKCVNFNFNGLTGTGVLTESNKKFLPFQQFGRDIADITDAVRDPQTLEILDITPCSFGGVSVITPGTNTSNQVAVLYQDVNCTEVPVAIHADQLTPTWRVYSTGSNVFQTRAGCLIGAEHVNNSYECDIPIGAGICASYQTQTNSPSRAGSVASQSIIAYTMSLGAENSVAYSNNSIAIPTNFTISVTTEILPVSMTKTSVDCTMYICGDSTECSNLLLQYGSFCTQLNRALTGIAVEQDKNTQEVFAQVKQIYKTPPIKDFGGFNFSQILPDPSKPSKRSFIEDLLFNKVTLADAGFIKQYGDCLGDIAARDLICAQKFNGLTVLPPLLTDEMIAQYTSALLAGTITSGWTFGAGAALQIPFAMQMAYRFNGIGVTQNVLYENQKLIANQFNSAIGKIQDSLSSTPSALGKLQDVVNQNAQALNTLVKQLSSNFGAISSVLNDILSRLDPPEAEVQIDRLITGRLQSLQTYVTQQLIRAAEIRASANLAATKMSECVLGQSKRVDFCGKGYHLMSFPQSAPHGVVFLHVTYVPAQEKNFTTAPAICHDGKAHFPREGVFVSNGTHWFVTQRNFYEPQIITTDNTFVSGNCDVVIGIVNNTVYDPLQPELDSFKEELDKYFKNHTSPDVDLGDISGINASVVNIQKEIDRLNEVAKNLNESLIDLQELGKYEQGSGYIPEAPRDGQAYVRKDGEWVLLSTFLGRSLEVLFQGPGSLPETGGGSDYKDDDDKGGGGSGGGGSGGGGSGGGGSGGGGSHHHHHH

SEQ ID NO: 110 - protein, 1297 aa, Artificial Sequence
  SEQ ID NO:3 + A942P + N532P
MFVFLVLLPLVSSQCVNLTTRTQLPPAYTNSFTRGVYYPDKVFRSSVLHSTQDLFLPFFSNVTWFHAIHVSGTNGTKRFDNPVLPFNDGVYFASTEKSNIIRGWIFGTTLDSKTQSLLIVNNATNVVIKVCEFQFCNDPFLGVYYHKNNKSWMESEFRVYSSANNCTFEYVSQPFLMDLEGKQGNFKNLREFVFKNIDGYFKIYSKHTPINLVRDLPQGFSALEPLVDLPIGINITRFQTLLALHRSYLTPGDSSSGWTAGAAAYYVGYLQPRTFLLKYNENGTITDAVDCALDPLSETKCTLKSFTVEKGIYQTSNFRVQPTESIVRFPNITNLCPFGEVFNATRFASVYAWNRKRISNCVADYSVLYNSASFSTFKCYGVSPTKLNDLCFTNVYADSFVIRGDEVRQIAPGQTGKIADYNYKLPDDFTGCVIAWNSNNLDSKVGGNYNYLYRLFRKSNLKPFERDISTEIYQAGSTPCNGVEGFNCYFPLQSYGFQPTNGVGYQPYRVVVLSFELLHAPATVCGPKKSTPLVKNKCVNFNFNGLTGTGVLTESNKKFLPFQQFGRDIADTTDAVRDPQTLEILDITPCSFGGVSVITPGTNTSNQVAVLYQDVNCTEVPVAIHADQLTPTWRVYSTGSNVFQTRAGCLIGAEHVNNSYECDIPIGAGICASYQTQTNSPSRAGSVASQSIIAYTMSLGAENSVAYSNNSIAIPTNFTISVTTEILPVSMTKTSVDCTMYICGDSTECSNLLLQYGSFCTQLNRALTGIAVEQDKNTQEVFAQVKQIYKTPPIKDFGGFNFSQILPDPSKPSKRSFIEDLLFNKVTLADAGFIKQYGDCLGDIAARDLICAQKFNGLTVLPPLLTDEMIAQYTSALLAGTITSGWTFGAGAALQIPFAMQMAYRFNGIGVTQNVLYENQKLIANQFNSAIGKIQDSLSSTPSALGKLQDVVNQNAQALNTLVKQLSSNFGAISSVLNDILSRLDPPEAEVQIDRLITGRLQSLQTYVTQQLIRAAEIRASANLAATKMSECVLGQSKRVDFCGKGYHLMSFPQSAPHGVVFLHVTYVPAQEKNFTTAPAICHDGKAHFPREGVFVSNGTHWFVTQRNFYEPQIITTDNTFVSGNCDVVIGIVNNTVYDPLQPELDSFKEELDKYFKNHTSPDVDLGDISGINASVVNIQKEIDRLNEVAKNLNESLIDLQELGKYEQGSGYIPEAPRDGQAYVRKDGEWVLLSTFLGRSLEVLFQGPGSLPETGGGSDYKDDDDKGGGGSGGGGSGGGGSGGGGSGGGGSHHHHHH

SEQ ID NO: 111 - protein, 1297 aa, Artificial Sequence
  SEQ ID NO:3 + A942P + G880C + F888C
MFVFLVLLPLVSSQCVNLTTRTQLPPAYTNSFTRGVYYPDKVFRSSVLHSTQDLFLPFFSNVTWFHAIHVSGTNGTKRFDNPVLPFNDGVYFASTEKSNIIRGWIFGTTLDSKTQSLLIVNNATNVVIKVCEFQFCNDPFLGVYYHKNNKSWMESEFRVYSSANNCTFEYVSQPFLMDLEGKQGNFKNLREFVFKNIDGYFKIYSKHTPINLVRDLPQGFSALEPLVDLPIGINITRFQTLLALHRSYLTPGDSSSGWTAGAAAYYVGYLQPRTFLLKYNENGTITDAVDCALDPLSETKCTLKSFTVEKGIYQTSNFRVQPTESIVRFPNITNLCPFGEVFNATRFASVYAWNRKRISNCVADYSVLYNSASFSTFKCYGVSPTKLNDLCFTNVYADSFVIRGDEVRQIAPGQTGKIADYNYKLPDDFTGCVIAWNSNNLDSKVGGNYNYLYRLFRKSNLKPFERDISTEIYQAGSTPCNGVEGFNCYFPLQSYGFQPTNGVGYQPYRVVVLSFELLHAPATVCGPKKSTNLVKNKCVNFNFNGLTGTGVLTESNKKFLPFQQFGRDIADTTDAVRDPQTLEILDITPCSFGGVSVITPGTNTSNQVAVLYQDVNCTEVPVAIHADQLTPTWRVYSTGSNVFQTRAGCLIGAEHVNNSYECDIPIGAGICASYQTQTNSPSRAGSVASQSIIAYTMSLGAENSVAYSNNSIAIPTNFTISVTTEILPVSMTKTSVDCTMYICGDSTECSNLLLQYGSFCTQLNRALTGIAVEQDKNTQEVFAQVKQIYKTPPIKDFGGFNFSQILPDPSKPSKRSFIEDLLFNKVTLADAGFIKQYGDCLGDIAARDLICAQKFNGLTVLPPLLTDEMIAQYTSALLACTITSGWTCGAGAALQIPFAMQMAYRFNGIGVTQNVLYENQKLIANQFNSAIGKIQDSLSSTPSALGKLQDVVNQNAQALNTLVKQLSSNFGAISSVLNDILSRLDPPEAEVQIDRLITGRLQSLQTYVTQQLIRAAEIRASANLAATKMSECVLGQSKRVDFCGKGYHLMSFPQSAPHGVVFLHVTYVPAQEKNFTTAPAICHDGKAHFPREGVFVSNGTHWFVTQRNFYEPQIITTDNTFVSGNCDVVIGIVNNTVYDPLQPELDSFKEELDKYFKNHTSPDVDLGDISGINASVVNIQKEIDRLNEVAKNLNESLIDLQELGKYEQGSGYIPEAPRDGQAYVRKDGEWVLLSTFLGRSLEVLFQGPGSLPETGGGSDYKDDDDKGGGGSGGGGSGGGGSGGGGSGGGGSHHHHHH

SEQ ID NO: 112 - protein, 1297 aa, Artificial Sequence
  SEQ ID NO:3 + A942P + S884C + A893C
MFVFLVLLPLVSSQCVNLTTRTQLPPAYTNSFTRGVYYPDKVFRSSVLHSTQDLFLPFFSNVTWFHAIHVSGTNGTKRFDNPVLPFNDGVYFASTEKSNIIRGWIFGTTLDSKTQSLLIVNNATNVVIKVCEFQFCNDPFLGVYYHKNNKSWMESEFRVYSSANNCTFEYVSQPFLMDLEGKQGNFKNLREFVFKNIDGYFKIYSKHTPINLVRDLPQGFSALEPLVDLPIGINITRFQTLLALHRSYLTPGDSSSGWTAGAAAYYVGYLQPRTFLLKYNENGTITDAVDCALDPLSETKCTLKSFTVEKGIYQTSNFRVQPTESIVRFPNITNLCPFGEVFNATRFASVYAWNRKRISNCVADYSVLYNSASFSTFKCYGVSPTKLNDLCFTNVYADSFVIRGDEVRQIAPGQTGKIADYNYKLPDDFTGCVIAWNSNNLDSKVGGNYNYLYRLFRKSNLKPFERDISTEIYQAGSTPCNGVEGFNCYFPLQSYGFQPTNGVGYQPYRVVVLSFELLHAPATVCGPKKSTNLVKNKCVNFNFNGLTGTGVLTESNKKFLPFQQFGRDIADTTDAVRDPQTLEILDITPCSFGGVSVITPGTNTSNQVAVLYQDVNCTEVPVAIHADQLTPTWRVYSTGSNVFQTRAGCLIGAEHVNNSYECDIPIGAGICASYQTQTNSPSRAGSVASQSIIAYTMSLGAENSVAYSNNSIAIPTNFTISVTTEILPVSMTKTSVDCTMYICGDSTECSNLLLQYGSFCTQLNRALTGIAVEQDKNTQEVFAQVKQIYKTPPIKDFGGFNFSQILPDPSKPSKRSFIEDLLFNKVTLADAGFIKQYGDCLGDIAARDLICAQKFNGLTVLPPLLTDEMIAQYTSALLAGTITCGWTFGAGACLQIPFAMQMAYRFNGIGVTQNVLYENQKLIANQFNSAIGKIQDSLSSTPSALGKLQDVVNQNAQALNTLVKQLSSNFGAISSVLNDILSRLDPPEAEVQIDRLITGRLQSLQTYVTQQLIRAAEIRASANLAATKMSECVLGQSKRVDFCGKGYHLMSFPQSAPHGVVFLHVTYVPAQEKNFTTAPAICHDGKAHFPREGVFVSNGTHWFVTQRNFYEPQIITTDNTFVSGNCDVVIGIVNNTVYDPLQPELDSFKEELDKYFKNHTSPDVDLGDISGINASVVNIQKEIDRLNEVAKNLNESLIDLQELGKYEQGSGYIPEAPRDGQAYVRKDGEWVLLSTFLGRSLEVLFQGPGSLPETGGGSDYKDDDDKGGGGSGGGGSGGGGSGGGGSGGGGSHHHHHH

SEQ ID NO: 113 - protein, 1297 aa, Artificial Sequence
  SEQ ID NO:3 + A892P + D614N
MFVFLVLLPLVSSQCVNLTTRTQLPPAYTNSFTRGVYYPDKVFRSSVLHSTQDLFLPFFSNVTWFHAIHVSGTNGTKRFDNPVLPFNDGVYFASTEKSNIIRGWIFGTTLDSKTQSLLIVNNATNVVIKVCEFQFCNDPFLGVYYHKNNKSWMESEFRVYSSANNCTFEYVSQPFLMDLEGKQGNFKNLREFVFKNIDGYFKIYSKHTPINLVRDLPQGFSALEPLVDLPIGINITRFQTLLALHRSYLTPGDSSSGWTAGAAAYYVGYLQPRTFLLKYNENGTITDAVDCALDPLSETKCTLKSFTVEKGIYQTSNFRVQPTESIVRFPNITNLCPFGEVFNATRFASVYAWNRKRISNCVADYSVLYNSASFSTFKCYGVSPTKLNDLCFTNVYADSFVIRGDEVRQIAPGQTGKIADYNYKLPDDFTGCVIAWNSNNLDSKVGGNYNYLYRLFRKSNLKPFERDISTEIYQAGSTPCNGVEGFNCYFPLQSYGFQPTNGVGYQPYRVVVLSFELLHAPATVCGPKKSTNLVKNKCVNFNFNGLTGTGVLTESNKKFLPFQQFGRDIADTTDAVRDPQTLEILDITPCSFGGVSVITPGTNTSNQVAVLYQNVNCTEVPVAIHADQLTPTWRVYSTGSNVFQTRAGCLIGAEHVNNSYECDIPIGAGICASYQTQTNSPSRAGSVASQSIIAYTMSLGAENSVAYSNNSIAIPTNFTISVTTEILPVSMTKTSVDCTMYICGDSTECSNLLLQYGSFCTQLNRALTGIAVEQDKNTQEVFAQVKQIYKTPPIKDFGGFNFSQILPDPSKPSKRSFIEDLLFNKVTLADAGFIKQYGDCLGDIAARDLICAQKFNGLTVLPPLLTDEMIAQYTSALLAGTITSGWTFGAGPALQIPFAMQMAYRFNGIGVTQNVLYENQKLIANQFNSAIGKIQDSLSSTASALGKLQDVVNQNAQALNTLVKQLSSNFGAISSVLNDILSRLDPPEAEVQIDRLITGRLQSLQTYVTQQLIRAAEIRASANLAATKMSECVLGQSKRVDFCGKGYHLMSFPQSAPHGVVFLHVTYVPAQEKNFTTAPAICHDGKAHFPREGVFVSNGTHWFVTQRNFYEPQIITTDNTFVSGNCDVVIGIVNNTVYDPLQPELDSFKEELDKYFKNHTSPDVDLGDISGINASVVNIQKEIDRLNEVAKNLNESLIDLQELGKYEQGSGYIPEAPRDGQAYVRKDGEWVLLSTFLGRSLEVLFQGPGSLPETGGGSDYKDDDDKGGGGSGGGGSGGGGSGGGGSGGGGSHHHHHH

SEQ ID NO: 114 - protein, 1297 aa, Artificial Sequence
  SEQ ID NO:3 + A892P + T572I
MFVFLVLLPLVSSQCVNLTTRTQLPPAYTNSFTRGVYYPDKVFRSSVLHSTQDLFLPFFSNVTWFHAIHVSGTNGTKRFDNPVLPFNDGVYFASTEKSNIIRGWIFGTTLDSKTQSLLIVNNATNVVIKVCEFQFCNDPFLGVYYHKNNKSWMESEFRVYSSANNCTFEYVSQPFLMDLEGKQGNFKNLREFVFKNIDGYFKIYSKHTPINLVRDLPQGFSALEPLVDLPIGINITRFQTLLALHRSYLTPGDSSSGWTAGAAAYYVGYLQPRTFLLKYNENGTITDAVDCALDPLSETKCTLKSFTVEKGIYQTSNFRVQPTESIVRFPNITNLCPFGEVFNATRFASVYAWNRKRISNCVADYSVLYNSASFSTFKCYGVSPTKLNDLCFTNVYADSFVIRGDEVRQIAPGQTGKIADYNYKLPDDFTGCVIAWNSNNLDSKVGGNYNYLYRLFRKSNLKPFERDISTEIYQAGSTPCNGVEGFNCYFPLQSYGFQPTNGVGYQPYRVVVLSFELLHAPATVCGPKKSTNLVKNKCVNFNFNGLTGTGVLTESNKKFLPFQQFGRDIADITDAVRDPQTLEILDITPCSFGGVSVITPGTNTSNQVAVLYQDVNCTEVPVAIHADQLTPTWRVYSTGSNVFQTRAGCLIGAEHVNNSYECDIPIGAGICASYQTQTNSPSRAGSVASQSIIAYTMSLGAENSVAYSNNSIAIPTNFTISVTTEILPVSMTKTSVDCTMYICGDSTECSNLLLQYGSFCTQLNRALTGIAVEQDKNTQEVFAQVKQIYKTPPIKDFGGFNFSQILPDPSKPSKRSFIEDLLFNKVTLADAGFIKQYGDCLGDIAARDLICAQKFNGLTVLPPLLTDEMIAQYTSALLAGTITSGWTFGAGPALQIPFAMQMAYRFNGIGVTQNVLYENQKLIANQFNSAIGKIQDSLSSTASALGKLQDVVNQNAQALNTLVKQLSSNFGAISSVLNDILSRLDPPEAEVQIDRLITGRLQSLQTYVTQQLIRAAEIRASANLAATKMSECVLGQSKRVDFCGKGYHLMSFPQSAPHGVVFLHVTYVPAQEKNFTTAPAICHDGKAHFPREGVFVSNGTHWFVTQRNFYEPQIITTDNTFVSGNCDVVIGIVNNTVYDPLQPELDSFKEELDKYFKNHTSPDVDLGDISGINASVVNIQKEIDRLNEVAKNLNESLIDLQELGKYEQGSGYIPEAPRDGQAYVRKDGEWVLLSTFLGRSLEVLFQGPGSLPETGGGSDYKDDDDKGGGGSGGGGSGGGGSGGGGSGGGGSHHHHHH

SEQ ID NO: 115 - protein, 1297 aa, Artificial Sequence
  SEQ ID NO:3 + A892P + N532P
MFVFLVLLPLVSSQCVNLTTRTQLPPAYTNSFTRGVYYPDKVFRSSVLHSTQDLFLPFFSNVTWFHAIHVSGTNGTKRFDNPVLPFNDGVYFASTEKSNIIRGWIFGTTLDSKTQSLLIVNNATNVVIKVCEFQFCNDPFLGVYYHKNNKSWMESEFRVYSSANNCTFEYVSQPFLMDLEGKQGNFKNLREFVFKNIDGYFKIYSKHTPINLVRDLPQGFSALEPLVDLPIGINITRFQTLLALHRSYLTPGDSSSGWTAGAAAYYVGYLQPRTFLLKYNENGTITDAVDCALDPLSETKCTLKSFTVEKGIYQTSNFRVQPTESIVRFPNITNLCPFGEVFNATRFASVYAWNRKRISNCVADYSVLYNSASFSTFKCYGVSPTKLNDLCFTNVYADSFVIRGDEVRQIAPGQTGKIADYNYKLPDDFTGCVIAWNSNNLDSKVGGNYNYLYRLFRKSNLKPFERDISTEIYQAGSTPCNGVEGFNCYFPLQSYGFQPTNGVGYQPYRVVVLSFELLHAPATVCGPKKSTPLVKNKCVNFNFNGLTGTGVLTESNKKFLPFQQFGRDIADTTDAVRDPQTLEILDITPCSFGGVSVITPGTNTSNQVAVLYQDVNCTEVPVAIHADQLTPTWRVYSTGSNVFQTRAGCLIGAEHVNNSYECDIPIGAGICASYQTQTNSPSRAGSVASQSIIAYTMSLGAENSVAYSNNSIAIPTNFTISVTTEILPVSMTKTSVDCTMYICGDSTECSNLLLQYGSFCTQLNRALTGIAVEQDKNTQEVFAQVKQIYKTPPIKDFGGFNFSQILPDPSKPSKRSFIEDLLFNKVTLADAGFIKQYGDCLGDIAARDLICAQKFNGLTVLPPLLTDEMIAQYTSALLAGTITSGWTFGAGPALQIPFAMQMAYRFNGIGVTQNVLYENQKLIANQFNSAIGKIQDSLSSTASALGKLQDVVNQNAQALNTLVKQLSSNFGAISSVLNDILSRLDPPEAEVQIDRLITGRLQSLQTYVTQQLIRAAEIRASANLAATKMSECVLGQSKRVDFCGKGYHLMSFPQSAPHGVVFLHVTYVPAQEKNFTTAPAICHDGKAHFPREGVFVSNGTHWFVTQRNFYEPQIITTDNTFVSGNCDVVIGIVNNTVYDPLQPELDSFKEELDKYFKNHTSPDVDLGDISGINASVVNIQKEIDRLNEVAKNLNESLIDLQELGKYEQGSGYIPEAPRDGQAYVRKDGEWVLLSTFLGRSLEVLFQGPGSLPETGGGSDYKDDDDKGGGGSGGGGSGGGGSGGGGSGGGGSHHHHHH

SEQ ID NO: 116 - protein, 1297 aa, Artificial Sequence
  SEQ ID NO:3 + A892P + G880C + F888C
MFVFLVLLPLVSSQCVNLTTRTQLPPAYTNSFTRGVYYPDKVFRSSVLHSTQDLFLPFFSNVTWFHAIHVSGTNGTKRFDNPVLPFNDGVYFASTEKSNIIRGWIFGTTLDSKTQSLLIVNNATNVVIKVCEFQFCNDPFLGVYYHKNNKSWMESEFRVYSSANNCTFEYVSQPFLMDLEGKQGNFKNLREFVFKNIDGYFKIYSKHTPINLVRDLPQGFSALEPLVDLPIGINITRFQTLLALHRSYLTPGDSSSGWTAGAAAYYVGYLQPRTFLLKYNENGTITDAVDCALDPLSETKCTLKSFTVEKGIYQTSNFRVQPTESIVRFPNITNLCPFGEVFNATRFASVYAWNRKRISNCVADYSVLYNSASFSTFKCYGVSPTKLNDLCFTNVYADSFVIRGDEVRQIAPGQTGKIADYNYKLPDDFTGCVIAWNSNNLDSKVGGNYNYLYRLFRKSNLKPFERDISTEIYQAGSTPCNGVEGFNCYFPLQSYGFQPTNGVGYQPYRVVVLSFELLHAPATVCGPKKSTNLVKNKCVNFNFNGLTGTGVLTESNKKFLPFQQFGRDIADTTDAVRDPQTLEILDITPCSFGGVSVITPGTNTSNQVAVLYQDVNCTEVPVAIHADQLTPTWRVYSTGSNVFQTRAGCLIGAEHVNNSYECDIPIGAGICASYQTQTNSPSRAGSVASQSIIAYTMSLGAENSVAYSNNSIAIPTNFTISVTTEILPVSMTKTSVDCTMYICGDSTECSNLLLQYGSFCTQLNRALTGIAVEQDKNTQEVFAQVKQIYKTPPIKDFGGFNFSQILPDPSKPSKRSFIEDLLFNKVTLADAGFIKQYGDCLGDIAARDLICAQKFNGLTVLPPLLTDEMIAQYTSALLACTITSGWTCGAGPALQIPFAMQMAYRFNGIGVTQNVLYENQKLIANQFNSAIGKIQDSLSSTASALGKLQDVVNQNAQALNTLVKQLSSNFGAISSVLNDILSRLDPPEAEVQIDRLITGRLQSLQTYVTQQLIRAAEIRASANLAATKMSECVLGQSKRVDFCGKGYHLMSFPQSAPHGVVFLHVTYVPAQEKNFTTAPAICHDGKAHFPREGVFVSNGTHWFVTQRNFYEPQIITTDNTFVSGNCDVVIGIVNNTVYDPLQPELDSFKEELDKYFKNHTSPDVDLGDISGINASVVNIQKEIDRLNEVAKNLNESLIDLQELGKYEQGSGYIPEAPRDGQAYVRKDGEWVLLSTFLGRSLEVLFQGPGSLPETGGGSDYKDDDDKGGGGSGGGGSGGGGSGGGGSGGGGSHHHHHH

SEQ ID NO: 117 - protein, 1297 aa, Artificial Sequence
  SEQ ID NO:3 + A892P + S884C + A893C
MFVFLVLLPLVSSQCVNLTTRTQLPPAYTNSFTRGVYYPDKVFRSSVLHSTQDLFLPFFSNVTWFHAIHVSGTNGTKRFDNPVLPFNDGVYFASTEKSNIIRGWIFGTTLDSKTQSLLIVNNATNVVIKVCEFQFCNDPFLGVYYHKNNKSWMESEFRVYSSANNCTFEYVSQPFLMDLEGKQGNFKNLREFVFKNIDGYFKIYSKHTPINLVRDLPQGFSALEPLVDLPIGINITRFQTLLALHRSYLTPGDSSSGWTAGAAAYYVGYLQPRTFLLKYNENGTITDAVDCALDPLSETKCTLKSFTVEKGIYQTSNFRVQPTESIVRFPNITNLCPFGEVFNATRFASVYAWNRKRISNCVADYSVLYNSASFSTFKCYGVSPTKLNDLCFTNVYADSFVIRGDEVRQIAPGQTGKIADYNYKLPDDFTGCVIAWNSNNLDSKVGGNYNYLYRLFRKSNLKPFERDISTEIYQAGSTPCNGVEGFNCYFPLQSYGFQPTNGVGYQPYRVVVLSFELLHAPATVCGPKKSTNLVKNKCVNFNFNGLTGTGVLTESNKKFLPFQQFGRDIADTTDAVRDPQTLEILDITPCSFGGVSVITPGTNTSNQVAVLYQDVNCTEVPVAIHADQLTPTWRVYSTGSNVFQTRAGCLIGAEHVNNSYECDIPIGAGICASYQTQTNSPSRAGSVASQSIIAYTMSLGAENSVAYSNNSIAIPTNFTISVTTEILPVSMTKTSVDCTMYICGDSTECSNLLLQYGSFCTQLNRALTGIAVEQDKNTQEVFAQVKQIYKTPPIKDFGGFNFSQILPDPSKPSKRSFIEDLLFNKVTLADAGFIKQYGDCLGDIAARDLICAQKFNGLTVLPPLLTDEMIAQYTSALLAGTITCGWTFGAGPCLQIPFAMQMAYRFNGIGVTQNVLYENQKLIANQFNSAIGKIQDSLSSTASALGKLQDVVNQNAQALNTLVKQLSSNFGAISSVLNDILSRLDPPEAEVQIDRLITGRLQSLQTYVTQQLIRAAEIRASANLAATKMSECVLGQSKRVDFCGKGYHLMSFPQSAPHGVVFLHVTYVPAQEKNFTTAPAICHDGKAHFPREGVFVSNGTHWFVTQRNFYEPQIITTDNTFVSGNCDVVIGIVNNTVYDPLQPELDSFKEELDKYFKNHTSPDVDLGDISGINASVVNIQKEIDRLNEVAKNLNESLIDLQELGKYEQGSGYIPEAPRDGQAYVRKDGEWVLLSTFLGRSLEVLFQGPGSLPETGGGSDYKDDDDKGGGGSGGGGSGGGGSGGGGSGGGGSHHHHHH

SEQ ID NO: 118 - protein, 1297 aa, Artificial Sequence
  SEQ ID NO:3 + D614N + T572I
MFVFLVLLPLVSSQCVNLTTRTQLPPAYTNSFTRGVYYPDKVFRSSVLHSTQDLFLPFFSNVTWFHAIHVSGTNGTKRFDNPVLPFNDGVYFASTEKSNIIRGWIFGTTLDSKTQSLLIVNNATNVVIKVCEFQFCNDPFLGVYYHKNNKSWMESEFRVYSSANNCTFEYVSQPFLMDLEGKQGNFKNLREFVFKNIDGYFKIYSKHTPINLVRDLPQGFSALEPLVDLPIGINITRFQTLLALHRSYLTPGDSSSGWTAGAAAYYVGYLQPRTFLLKYNENGTITDAVDCALDPLSETKCTLKSFTVEKGIYQTSNFRVQPTESIVRFPNITNLCPFGEVFNATRFASVYAWNRKRISNCVADYSVLYNSASFSTFKCYGVSPTKLNDLCFTNVYADSFVIRGDEVRQIAPGQTGKIADYNYKLPDDFTGCVIAWNSNNLDSKVGGNYNYLYRLFRKSNLKPFERDISTEIYQAGSTPCNGVEGFNCYFPLQSYGFQPTNGVGYQPYRVVVLSFELLHAPATVCGPKKSTNLVKNKCVNFNFNGLTGTGVLTESNKKFLPFQQFGRDIADITDAVRDPQTLEILDITPCSFGGVSVITPGTNTSNQVAVLYQNVNCTEVPVAIHADQLTPTWRVYSTGSNVFQTRAGCLIGAEHVNNSYECDIPIGAGICASYQTQTNSPSRAGSVASQSIIAYTMSLGAENSVAYSNNSIAIPTNFTISVTTEILPVSMTKTSVDCTMYICGDSTECSNLLLQYGSFCTQLNRALTGIAVEQDKNTQEVFAQVKQIYKTPPIKDFGGFNFSQILPDPSKPSKRSFIEDLLFNKVTLADAGFIKQYGDCLGDIAARDLICAQKFNGLTVLPPLLTDEMIAQYTSALLAGTITSGWTFGAGAALQIPFAMQMAYRFNGIGVTQNVLYENQKLIANQFNSAIGKIQDSLSSTASALGKLQDVVNQNAQALNTLVKQLSSNFGAISSVLNDILSRLDPPEAEVQIDRLITGRLQSLQTYVTQQLIRAAEIRASANLAATKMSECVLGQSKRVDFCGKGYHLMSFPQSAPHGVVFLHVTYVPAQEKNFTTAPAICHDGKAHFPREGVFVSNGTHWFVTQRNFYEPQIITTDNTFVSGNCDVVIGIVNNTVYDPLQPELDSFKEELDKYFKNHTSPDVDLGDISGINASVVNIQKEIDRLNEVAKNLNESLIDLQELGKYEQGSGYIPEAPRDGQAYVRKDGEWVLLSTFLGRSLEVLFQGPGSLPETGGGSDYKDDDDKGGGGSGGGGSGGGGSGGGGSGGGGSHHHHHH

SEQ ID NO: 119 - protein, 1297 aa, Artificial Sequence
  SEQ ID NO:3 + D614N + N532P
MFVFLVLLPLVSSQCVNLTTRTQLPPAYTNSFTRGVYYPDKVFRSSVLHSTQDLFLPFFSNVTWFHAIHVSGTNGTKRFDNPVLPFNDGVYFASTEKSNIIRGWIFGTTLDSKTQSLLIVNNATNVVIKVCEFQFCNDPFLGVYYHKNNKSWMESEFRVYSSANNCTFEYVSQPFLMDLEGKQGNFKNLREFVFKNIDGYFKIYSKHTPINLVRDLPQGFSALEPLVDLPIGINITRFQTLLALHRSYLTPGDSSSGWTAGAAAYYVGYLQPRTFLLKYNENGTITDAVDCALDPLSETKCTLKSFTVEKGIYQTSNFRVQPTESIVRFPNITNLCPFGEVFNATRFASVYAWNRKRISNCVADYSVLYNSASFSTFKCYGVSPTKLNDLCFTNVYADSFVIRGDEVRQIAPGQTGKIADYNYKLPDDFTGCVIAWNSNNLDSKVGGNYNYLYRLFRKSNLKPFERDISTEIYQAGSTPCNGVEGFNCYFPLQSYGFQPTNGVGYQPYRVVVLSFELLHAPATVCGPKKSTPLVKNKCVNFNFNGLTGTGVLTESNKKFLPFQQFGRDIADTTDAVRDPQTLEILDITPCSFGGVSVITPGTNTSNQVAVLYQNVNCTEVPVAIHADQLTPTWRVYSTGSNVFQTRAGCLIGAEHVNNSYECDIPIGAGICASYQTQTNSPSRAGSVASQSIIAYTMSLGAENSVAYSNNSIAIPTNFTISVTTEILPVSMTKTSVDCTMYICGDSTECSNLLLQYGSFCTQLNRALTGIAVEQDKNTQEVFAQVKQIYKTPPIKDFGGFNFSQILPDPSKPSKRSFIEDLLFNKVTLADAGFIKQYGDCLGDIAARDLICAQKFNGLTVLPPLLTDEMIAQYTSALLAGTITSGWTFGAGAALQIPFAMQMAYRFNGIGVTQNVLYENQKLIANQFNSAIGKIQDSLSSTASALGKLQDVVNQNAQALNTLVKQLSSNFGAISSVLNDILSRLDPPEAEVQIDRLITGRLQSLQTYVTQQLIRAAEIRASANLAATKMSECVLGQSKRVDFCGKGYHLMSFPQSAPHGVVFLHVTYVPAQEKNFTTAPAICHDGKAHFPREGVFVSNGTHWFVTQRNFYEPQIITTDNTFVSGNCDVVIGIVNNTVYDPLQPELDSFKEELDKYFKNHTSPDVDLGDISGINASVVNIQKEIDRLNEVAKNLNESLIDLQELGKYEQGSGYIPEAPRDGQAYVRKDGEWVLLSTFLGRSLEVLFQGPGSLPETGGGSDYKDDDDKGGGGSGGGGSGGGGSGGGGSGGGGSHHHHHH

SEQ ID NO: 120 - protein, 1297 aa, Artificial Sequence
  SEQ ID NO:3 + D614N + G880C + F888C
MFVFLVLLPLVSSQCVNLTTRTQLPPAYTNSFTRGVYYPDKVFRSSVLHSTQDLFLPFFSNVTWFHAIHVSGTNGTKRFDNPVLPFNDGVYFASTEKSNIIRGWIFGTTLDSKTQSLLIVNNATNVVIKVCEFQFCNDPFLGVYYHKNNKSWMESEFRVYSSANNCTFEYVSQPFLMDLEGKQGNFKNLREFVFKNIDGYFKIYSKHTPINLVRDLPQGFSALEPLVDLPIGINITRFQTLLALHRSYLTPGDSSSGWTAGAAAYYVGYLQPRTFLLKYNENGTITDAVDCALDPLSETKCTLKSFTVEKGIYQTSNFRVQPTESIVRFPNITNLCPFGEVFNATRFASVYAWNRKRISNCVADYSVLYNSASFSTFKCYGVSPTKLNDLCFTNVYADSFVIRGDEVRQIAPGQTGKIADYNYKLPDDFTGCVIAWNSNNLDSKVGGNYNYLYRLFRKSNLKPFERDISTEIYQAGSTPCNGVEGFNCYFPLQSYGFQPTNGVGYQPYRVVVLSFELLHAPATVCGPKKSTNLVKNKCVNFNFNGLTGTGVLTESNKKFLPFQQFGRDIADTTDAVRDPQTLEILDITPCSFGGVSVITPGTNTSNQVAVLYQNVNCTEVPVAIHADQLTPTWRVYSTGSNVFQTRAGCLIGAEHVNNSYECDIPIGAGICASYQTQTNSPSRAGSVASQSIIAYTMSLGAENSVAYSNNSIAIPTNFTISVTTEILPVSMTKTSVDCTMYICGDSTECSNLLLQYGSFCTQLNRALTGIAVEQDKNTQEVFAQVKQIYKTPPIKDFGGFNFSQILPDPSKPSKRSFIEDLLFNKVTLADAGFIKQYGDCLGDIAARDLICAQKFNGLTVLPPLLTDEMIAQYTSALLACTITSGWTCGAGAALQIPFAMQMAYRFNGIGVTQNVLYENQKLIANQFNSAIGKIQDSLSSTASALGKLQDVVNQNAQALNTLVKQLSSNFGAISSVLNDILSRLDPPEAEVQIDRLITGRLQSLQTYVTQQLIRAAEIRASANLAATKMSECVLGQSKRVDFCGKGYHLMSFPQSAPHGVVFLHVTYVPAQEKNFTTAPAICHDGKAHFPREGVFVSNGTHWFVTQRNFYEPQIITTDNTFVSGNCDVVIGIVNNTVYDPLQPELDSFKEELDKYFKNHTSPDVDLGDISGINASVVNIQKEIDRLNEVAKNLNESLIDLQELGKYEQGSGYIPEAPRDGQAYVRKDGEWVLLSTFLGRSLEVLFQGPGSLPETGGGSDYKDDDDKGGGGSGGGGSGGGGSGGGGSGGGGSHHHHHH

SEQ ID NO: 121 - protein, 1297 aa, Artificial Sequence
  SEQ ID NO:3 + D614N + S884C + A893C
MFVFLVLLPLVSSQCVNLTTRTQLPPAYTNSFTRGVYYPDKVFRSSVLHSTQDLFLPFFSNVTWFHAIHVSGTNGTKRFDNPVLPFNDGVYFASTEKSNIIRGWIFGTTLDSKTQSLLIVNNATNVVIKVCEFQFCNDPFLGVYYHKNNKSWMESEFRVYSSANNCTFEYVSQPFLMDLEGKQGNFKNLREFVFKNIDGYFKIYSKHTPINLVRDLPQGFSALEPLVDLPIGINITRFQTLLALHRSYLTPGDSSSGWTAGAAAYYVGYLQPRTFLLKYNENGTITDAVDCALDPLSETKCTLKSFTVEKGIYQTSNFRVQPTESIVRFPNITNLCPFGEVFNATRFASVYAWNRKRISNCVADYSVLYNSASFSTFKCYGVSPTKLNDLCFTNVYADSFVIRGDEVRQIAPGQTGKIADYNYKLPDDFTGCVIAWNSNNLDSKVGGNYNYLYRLFRKSNLKPFERDISTEIYQAGSTPCNGVEGFNCYFPLQSYGFQPTNGVGYQPYRVVVLSFELLHAPATVCGPKKSTNLVKNKCVNFNFNGLTGTGVLTESNKKFLPFQQFGRDIADTTDAVRDPQTLEILDITPCSFGGVSVITPGTNTSNQVAVLYQNVNCTEVPVAIHADQLTPTWRVYSTGSNVFQTRAGCLIGAEHVNNSYECDIPIGAGICASYQTQTNSPSRAGSVASQSIIAYTMSLGAENSVAYSNNSIAIPTNFTISVTTEILPVSMTKTSVDCTMYICGDSTECSNLLLQYGSFCTQLNRALTGIAVEQDKNTQEVFAQVKQIYKTPPIKDFGGFNFSQILPDPSKPSKRSFIEDLLFNKVTLADAGFIKQYGDCLGDIAARDLICAQKFNGLTVLPPLLTDEMIAQYTSALLAGTITCGWTFGAGACLQIPFAMQMAYRFNGIGVTQNVLYENQKLIANQFNSAIGKIQDSLSSTASALGKLQDVVNQNAQALNTLVKQLSSNFGAISSVLNDILSRLDPPEAEVQIDRLITGRLQSLQTYVTQQLIRAAEIRASANLAATKMSECVLGQSKRVDFCGKGYHLMSFPQSAPHGVVFLHVTYVPAQEKNFTTAPAICHDGKAHFPREGVFVSNGTHWFVTQRNFYEPQIITTDNTFVSGNCDVVIGIVNNTVYDPLQPELDSFKEELDKYFKNHTSPDVDLGDISGINASVVNIQKEIDRLNEVAKNLNESLIDLQELGKYEQGSGYIPEAPRDGQAYVRKDGEWVLLSTFLGRSLEVLFQGPGSLPETGGGSDYKDDDDKGGGGSGGGGSGGGGSGGGGSGGGGSHHHHHH

SEQ ID NO: 122 - protein, 1297 aa, Artificial Sequence
  SEQ ID NO:3 + T572I + N532P
MFVFLVLLPLVSSQCVNLTTRTQLPPAYTNSFTRGVYYPDKVFRSSVLHSTQDLFLPFFSNVTWFHAIHVSGTNGTKRFDNPVLPFNDGVYFASTEKSNIIRGWIFGTTLDSKTQSLLIVNNATNVVIKVCEFQFCNDPFLGVYYHKNNKSWMESEFRVYSSANNCTFEYVSQPFLMDLEGKQGNFKNLREFVFKNIDGYFKIYSKHTPINLVRDLPQGFSALEPLVDLPIGINITRFQTLLALHRSYLTPGDSSSGWTAGAAAYYVGYLQPRTFLLKYNENGTITDAVDCALDPLSETKCTLKSFTVEKGIYQTSNFRVQPTESIVRFPNITNLCPFGEVFNATRFASVYAWNRKRISNCVADYSVLYNSASFSTFKCYGVSPTKLNDLCFTNVYADSFVIRGDEVRQIAPGQTGKIADYNYKLPDDFTGCVIAWNSNNLDSKVGGNYNYLYRLFRKSNLKPFERDISTEIYQAGSTPCNGVEGFNCYFPLQSYGFQPTNGVGYQPYRVVVLSFELLHAPATVCGPKKSTPLVKNKCVNFNFNGLTGTGVLTESNKKFLPFQQFGRDIADITDAVRDPQTLEILDITPCSFGGVSVITPGTNTSNQVAVLYQDVNCTEVPVAIHADQLTPTWRVYSTGSNVFQTRAGCLIGAEHVNNSYECDIPIGAGICASYQTQTNSPSRAGSVASQSIIAYTMSLGAENSVAYSNNSIAIPTNFTISVTTEILPVSMTKTSVDCTMYICGDSTECSNLLLQYGSFCTQLNRALTGIAVEQDKNTQEVFAQVKQIYKTPPIKDFGGFNFSQILPDPSKPSKRSFIEDLLFNKVTLADAGFIKQYGDCLGDIAARDLICAQKFNGLTVLPPLLTDEMIAQYTSALLAGTITSGWTFGAGAALQIPFAMQMAYRFNGIGVTQNVLYENQKLIANQFNSAIGKIQDSLSSTASALGKLQDVVNQNAQALNTLVKQLSSNFGAISSVLNDILSRLDPPEAEVQIDRLITGRLQSLQTYVTQQLIRAAEIRASANLAATKMSECVLGQSKRVDFCGKGYHLMSFPQSAPHGVVFLHVTYVPAQEKNFTTAPAICHDGKAHFPREGVFVSNGTHWFVTQRNFYEPQIITTDNTFVSGNCDVVIGIVNNTVYDPLQPELDSFKEELDKYFKNHTSPDVDLGDISGINASVVNIQKEIDRLNEVAKNLNESLIDLQELGKYEQGSGYIPEAPRDGQAYVRKDGEWVLLSTFLGRSLEVLFQGPGSLPETGGGSDYKDDDDKGGGGSGGGGSGGGGSGGGGSGGGGSHHHHHH

SEQ ID NO: 123 - protein, 1297 aa, Artificial Sequence
  SEQ ID NO:3 + T572I + G880C + F888C
MFVFLVLLPLVSSQCVNLTTRTQLPPAYTNSFTRGVYYPDKVFRSSVLHSTQDLFLPFFSNVTWFHAIHVSGTNGTKRFDNPVLPFNDGVYFASTEKSNIIRGWIFGTTLDSKTQSLLIVNNATNVVIKVCEFQFCNDPFLGVYYHKNNKSWMESEFRVYSSANNCTFEYVSQPFLMDLEGKQGNFKNLREFVFKNIDGYFKIYSKHTPINLVRDLPQGFSALEPLVDLPIGINITRFQTLLALHRSYLTPGDSSSGWTAGAAAYYVGYLQPRTFLLKYNENGTITDAVDCALDPLSETKCTLKSFTVEKGIYQTSNFRVQPTESIVRFPNITNLCPFGEVFNATRFASVYAWNRKRISNCVADYSVLYNSASFSTFKCYGVSPTKLNDLCFTNVYADSFVIRGDEVRQIAPGQTGKIADYNYKLPDDFTGCVIAWNSNNLDSKVGGNYNYLYRLFRKSNLKPFERDISTEIYQAGSTPCNGVEGFNCYFPLQSYGFQPTNGVGYQPYRVVVLSFELLHAPATVCGPKKSTNLVKNKCVNFNFNGLTGTGVLTESNKKFLPFQQFGRDIADITDAVRDPQTLEILDITPCSFGGVSVITPGTNTSNQVAVLYQDVNCTEVPVAIHADQLTPTWRVYSTGSNVFQTRAGCLIGAEHVNNSYECDIPIGAGICASYQTQTNSPSRAGSVASQSIIAYTMSLGAENSVAYSNNSIAIPTNFTISVTTEILPVSMTKTSVDCTMYICGDSTECSNLLLQYGSFCTQLNRALTGIAVEQDKNTQEVFAQVKQIYKTPPIKDFGGFNFSQILPDPSKPSKRSFIEDLLFNKVTLADAGFIKQYGDCLGDIAARDLICAQKFNGLTVLPPLLTDEMIAQYTSALLACTITSGWTCGAGAALQIPFAMQMAYRFNGIGVTQNVLYENQKLIANQFNSAIGKIQDSLSSTASALGKLQDVVNQNAQALNTLVKQLSSNFGAISSVLNDILSRLDPPEAEVQIDRLITGRLQSLQTYVTQQLIRAAEIRASANLAATKMSECVLGQSKRVDFCGKGYHLMSFPQSAPHGVVFLHVTYVPAQEKNFTTAPAICHDGKAHFPREGVFVSNGTHWFVTQRNFYEPQIITTDNTFVSGNCDVVIGIVNNTVYDPLQPELDSFKEELDKYFKNHTSPDVDLGDISGINASVVNIQKEIDRLNEVAKNLNESLIDLQELGKYEQGSGYIPEAPRDGQAYVRKDGEWVLLSTFLGRSLEVLFQGPGSLPETGGGSDYKDDDDKGGGGSGGGGSGGGGSGGGGSGGGGSHHHHHH

SEQ ID NO: 124 - protein, 1297 aa, Artificial Sequence
  SEQ ID NO:3 + T572I + S884C + A893C
MFVFLVLLPLVSSQCVNLTTRTQLPPAYTNSFTRGVYYPDKVFRSSVLHSTQDLFLPFFSNVTWFHAIHVSGTNGTKRFDNPVLPFNDGVYFASTEKSNIIRGWIFGTTLDSKTQSLLIVNNATNVVIKVCEFQFCNDPFLGVYYHKNNKSWMESEFRVYSSANNCTFEYVSQPFLMDLEGKQGNFKNLREFVFKNIDGYFKIYSKHTPINLVRDLPQGFSALEPLVDLPIGINITRFQTLLALHRSYLTPGDSSSGWTAGAAAYYVGYLQPRTFLLKYNENGTITDAVDCALDPLSETKCTLKSFTVEKGIYQTSNFRVQPTESIVRFPNITNLCPFGEVFNATRFASVYAWNRKRISNCVADYSVLYNSASFSTFKCYGVSPTKLNDLCFTNVYADSFVIRGDEVRQIAPGQTGKIADYNYKLPDDFTGCVIAWNSNNLDSKVGGNYNYLYRLFRKSNLKPFERDISTEIYQAGSTPCNGVEGFNCYFPLQSYGFQPTNGVGYQPYRVVVLSFELLHAPATVCGPKKSTNLVKNKCVNFNFNGLTGTGVLTESNKKFLPFQQFGRDIADITDAVRDPQTLEILDITPCSFGGVSVITPGTNTSNQVAVLYQDVNCTEVPVAIHADQLTPTWRVYSTGSNVFQTRAGCLIGAEHVNNSYECDIPIGAGICASYQTQTNSPSRAGSVASQSIIAYTMSLGAENSVAYSNNSIAIPTNFTISVTTEILPVSMTKTSVDCTMYICGDSTECSNLLLQYGSFCTQLNRALTGIAVEQDKNTQEVFAQVKQIYKTPPIKDFGGFNFSQILPDPSKPSKRSFIEDLLFNKVTLADAGFIKQYGDCLGDIAARDLICAQKFNGLTVLPPLLTDEMIAQYTSALLAGTITCGWTFGAGACLQIPFAMQMAYRFNGIGVTQNVLYENQKLIANQFNSAIGKIQDSLSSTASALGKLQDVVNQNAQALNTLVKQLSSNFGAISSVLNDILSRLDPPEAEVQIDRLITGRLQSLQTYVTQQLIRAAEIRASANLAATKMSECVLGQSKRVDFCGKGYHLMSFPQSAPHGVVFLHVTYVPAQEKNFTTAPAICHDGKAHFPREGVFVSNGTHWFVTQRNFYEPQIITTDNTFVSGNCDVVIGIVNNTVYDPLQPELDSFKEELDKYFKNHTSPDVDLGDISGINASVVNIQKEIDRLNEVAKNLNESLIDLQELGKYEQGSGYIPEAPRDGQAYVRKDGEWVLLSTFLGRSLEVLFQGPGSLPETGGGSDYKDDDDKGGGGSGGGGSGGGGSGGGGSGGGGSHHHHHH

SEQ ID NO: 125 - protein, 1297 aa, Artificial Sequence
  SEQ ID NO:3 + N532P + G880C + F888C
MFVFLVLLPLVSSQCVNLTTRTQLPPAYTNSFTRGVYYPDKVFRSSVLHSTQDLFLPFFSNVTWFHAIHVSGTNGTKRFDNPVLPFNDGVYFASTEKSNIIRGWIFGTTLDSKTQSLLIVNNATNVVIKVCEFQFCNDPFLGVYYHKNNKSWMESEFRVYSSANNCTFEYVSQPFLMDLEGKQGNFKNLREFVFKNIDGYFKIYSKHTPINLVRDLPQGFSALEPLVDLPIGINITRFQTLLALHRSYLTPGDSSSGWTAGAAAYYVGYLQPRTFLLKYNENGTITDAVDCALDPLSETKCTLKSFTVEKGIYQTSNFRVQPTESIVRFPNITNLCPFGEVFNATRFASVYAWNRKRISNCVADYSVLYNSASFSTFKCYGVSPTKLNDLCFTNVYADSFVIRGDEVRQIAPGQTGKIADYNYKLPDDFTGCVIAWNSNNLDSKVGGNYNYLYRLFRKSNLKPFERDISTEIYQAGSTPCNGVEGFNCYFPLQSYGFQPTNGVGYQPYRVVVLSFELLHAPATVCGPKKSTPLVKNKCVNFNFNGLTGTGVLTESNKKFLPFQQFGRDIADTTDAVRDPQTLEILDITPCSFGGVSVITPGTNTSNQVAVLYQDVNCTEVPVAIHADQLTPTWRVYSTGSNVFQTRAGCLIGAEHVNNSYECDIPIGAGICASYQTQTNSPSRAGSVASQSIIAYTMSLGAENSVAYSNNSIAIPTNFTISVTTEILPVSMTKTSVDCTMYICGDSTECSNLLLQYGSFCTQLNRALTGIAVEQDKNTQEVFAQVKQIYKTPPIKDFGGFNFSQILPDPSKPSKRSFIEDLLFNKVTLADAGFIKQYGDCLGDIAARDLICAQKFNGLTVLPPLLTDEMIAQYTSALLACTITSGWTCGAGAALQIPFAMQMAYRFNGIGVTQNVLYENQKLIANQFNSAIGKIQDSLSSTASALGKLQDVVNQNAQALNTLVKQLSSNFGAISSVLNDILSRLDPPEAEVQIDRLITGRLQSLQTYVTQQLIRAAEIRASANLAATKMSECVLGQSKRVDFCGKGYHLMSFPQSAPHGVVFLHVTYVPAQEKNFTTAPAICHDGKAHFPREGVFVSNGTHWFVTQRNFYEPQIITTDNTFVSGNCDVVIGIVNNTVYDPLQPELDSFKEELDKYFKNHTSPDVDLGDISGINASVVNIQKEIDRLNEVAKNLNESLIDLQELGKYEQGSGYIPEAPRDGQAYVRKDGEWVLLSTFLGRSLEVLFQGPGSLPETGGGSDYKDDDDKGGGGSGGGGSGGGGSGGGGSGGGGSHHHHHH

SEQ ID NO: 126 - protein, 1297 aa, Artificial Sequence
  SEQ ID NO:3 + N532P + S884C + A893C
MFVFLVLLPLVSSQCVNLTTRTQLPPAYTNSFTRGVYYPDKVFRSSVLHSTQDLFLPFFSNVTWFHAIHVSGTNGTKRFDNPVLPFNDGVYFASTEKSNIIRGWIFGTTLDSKTQSLLIVNNATNVVIKVCEFQFCNDPFLGVYYHKNNKSWMESEFRVYSSANNCTFEYVSQPFLMDLEGKQGNFKNLREFVFKNIDGYFKIYSKHTPINLVRDLPQGFSALEPLVDLPIGINITRFQTLLALHRSYLTPGDSSSGWTAGAAAYYVGYLQPRTFLLKYNENGTITDAVDCALDPLSETKCTLKSFTVEKGIYQTSNFRVQPTESIVRFPNITNLCPFGEVFNATRFASVYAWNRKRISNCVADYSVLYNSASFSTFKCYGVSPTKLNDLCFTNVYADSFVIRGDEVRQIAPGQTGKIADYNYKLPDDFTGCVIAWNSNNLDSKVGGNYNYLYRLFRKSNLKPFERDISTEIYQAGSTPCNGVEGFNCYFPLQSYGFQPTNGVGYQPYRVVVLSFELLHAPATVCGPKKSTPLVKNKCVNFNFNGLTGTGVLTESNKKFLPFQQFGRDIADTTDAVRDPQTLEILDITPCSFGGVSVITPGTNTSNQVAVLYQDVNCTEVPVAIHADQLTPTWRVYSTGSNVFQTRAGCLIGAEHVNNSYECDIPIGAGICASYQTQTNSPSRAGSVASQSIIAYTMSLGAENSVAYSNNSIAIPTNFTISVTTEILPVSMTKTSVDCTMYICGDSTECSNLLLQYGSFCTQLNRALTGIAVEQDKNTQEVFAQVKQIYKTPPIKDFGGFNFSQILPDPSKPSKRSFIEDLLFNKVTLADAGFIKQYGDCLGDIAARDLICAQKFNGLTVLPPLLTDEMIAQYTSALLAGTITCGWTFGAGACLQIPFAMQMAYRFNGIGVTQNVLYENQKLIANQFNSAIGKIQDSLSSTASALGKLQDVVNQNAQALNTLVKQLSSNFGAISSVLNDILSRLDPPEAEVQIDRLITGRLQSLQTYVTQQLIRAAEIRASANLAATKMSECVLGQSKRVDFCGKGYHLMSFPQSAPHGVVFLHVTYVPAQEKNFTTAPAICHDGKAHFPREGVFVSNGTHWFVTQRNFYEPQIITTDNTFVSGNCDVVIGIVNNTVYDPLQPELDSFKEELDKYFKNHTSPDVDLGDISGINASVVNIQKEIDRLNEVAKNLNESLIDLQELGKYEQGSGYIPEAPRDGQAYVRKDGEWVLLSTFLGRSLEVLFQGPGSLPETGGGSDYKDDDDKGGGGSGGGGSGGGGSGGGGSGGGGSHHHHHH

SEQ ID NO: 127 - protein, 1297 aa, Artificial Sequence
  SEQ ID NO:3 + A942P + A892P + D614N
MFVFLVLLPLVSSQCVNLTTRTQLPPAYTNSFTRGVYYPDKVFRSSVLHSTQDLFLPFFSNVTWFHAIHVSGTNGTKRFDNPVLPFNDGVYFASTEKSNIIRGWIFGTTLDSKTQSLLIVNNATNVVIKVCEFQFCNDPFLGVYYHKNNKSWMESEFRVYSSANNCTFEYVSQPFLMDLEGKQGNFKNLREFVFKNIDGYFKIYSKHTPINLVRDLPQGFSALEPLVDLPIGINITRFQTLLALHRSYLTPGDSSSGWTAGAAAYYVGYLQPRTFLLKYNENGTITDAVDCALDPLSETKCTLKSFTVEKGIYQTSNFRVQPTESIVRFPNITNLCPFGEVFNATRFASVYAWNRKRISNCVADYSVLYNSASFSTFKCYGVSPTKLNDLCFTNVYADSFVIRGDEVRQIAPGQTGKIADYNYKLPDDFTGCVIAWNSNNLDSKVGGNYNYLYRLFRKSNLKPFERDISTEIYQAGSTPCNGVEGFNCYFPLQSYGFQPTNGVGYQPYRVVVLSFELLHAPATVCGPKKSTNLVKNKCVNFNFNGLTGTGVLTESNKKFLPFQQFGRDIADTTDAVRDPQTLEILDITPCSFGGVSVITPGTNTSNQVAVLYQNVNCTEVPVAIHADQLTPTWRVYSTGSNVFQTRAGCLIGAEHVNNSYECDIPIGAGICASYQTQTNSPSRAGSVASQSIIAYTMSLGAENSVAYSNNSIAIPTNFTISVTTEILPVSMTKTSVDCTMYICGDSTECSNLLLQYGSFCTQLNRALTGIAVEQDKNTQEVFAQVKQIYKTPPIKDFGGFNFSQILPDPSKPSKRSFIEDLLFNKVTLADAGFIKQYGDCLGDIAARDLICAQKFNGLTVLPPLLTDEMIAQYTSALLAGTITSGWTFGAGPALQIPFAMQMAYRFNGIGVTQNVLYENQKLIANQFNSAIGKIQDSLSSTPSALGKLQDVVNQNAQALNTLVKQLSSNFGAISSVLNDILSRLDPPEAEVQIDRLITGRLQSLQTYVTQQLIRAAEIRASANLAATKMSECVLGQSKRVDFCGKGYHLMSFPQSAPHGVVFLHVTYVPAQEKNFTTAPAICHDGKAHFPREGVFVSNGTHWFVTQRNFYEPQIITTDNTFVSGNCDVVIGIVNNTVYDPLQPELDSFKEELDKYFKNHTSPDVDLGDISGINASVVNIQKEIDRLNEVAKNLNESLIDLQELGKYEQGSGYIPEAPRDGQAYVRKDGEWVLLSTFLGRSLEVLFQGPGSLPETGGGSDYKDDDDKGGGGSGGGGSGGGGSGGGGSGGGGSHHHHHH

SEQ ID NO: 128 - protein, 1297 aa, Artificial Sequence
  SEQ ID NO:3 + A942P + A892P + T572I
MFVFLVLLPLVSSQCVNLTTRTQLPPAYTNSFTRGVYYPDKVFRSSVLHSTQDLFLPFFSNVTWFHAIHVSGTNGTKRFDNPVLPFNDGVYFASTEKSNIIRGWIFGTTLDSKTQSLLIVNNATNVVIKVCEFQFCNDPFLGVYYHKNNKSWMESEFRVYSSANNCTFEYVSQPFLMDLEGKQGNFKNLREFVFKNIDGYFKIYSKHTPINLVRDLPQGFSALEPLVDLPIGINITRFQTLLALHRSYLTPGDSSSGWTAGAAAYYVGYLQPRTFLLKYNENGTITDAVDCALDPLSETKCTLKSFTVEKGIYQTSNFRVQPTESIVRFPNITNLCPFGEVFNATRFASVYAWNRKRISNCVADYSVLYNSASFSTFKCYGVSPTKLNDLCFTNVYADSFVIRGDEVRQIAPGQTGKIADYNYKLPDDFTGCVIAWNSNNLDSKVGGNYNYLYRLFRKSNLKPFERDISTEIYQAGSTPCNGVEGFNCYFPLQSYGFQPTNGVGYQPYRVVVLSFELLHAPATVCGPKKSTNLVKNKCVNFNFNGLTGTGVLTESNKKFLPFQQFGRDIADITDAVRDPQTLEILDITPCSFGGVSVITPGTNTSNQVAVLYQDVNCTEVPVAIHADQLTPTWRVYSTGSNVFQTRAGCLIGAEHVNNSYECDIPIGAGICASYQTQTNSPSRAGSVASQSIIAYTMSLGAENSVAYSNNSIAIPTNFTISVTTEILPVSMTKTSVDCTMYICGDSTECSNLLLQYGSFCTQLNRALTGIAVEQDKNTQEVFAQVKQIYKTPPIKDFGGFNFSQILPDPSKPSKRSFIEDLLFNKVTLADAGFIKQYGDCLGDIAARDLICAQKFNGLTVLPPLLTDEMIAQYTSALLAGTITSGWTFGAGPALQIPFAMQMAYRFNGIGVTQNVLYENQKLIANQFNSAIGKIQDSLSSTPSALGKLQDVVNQNAQALNTLVKQLSSNFGAISSVLNDILSRLDPPEAEVQIDRLITGRLQSLQTYVTQQLIRAAEIRASANLAATKMSECVLGQSKRVDFCGKGYHLMSFPQSAPHGVVFLHVTYVPAQEKNFTTAPAICHDGKAHFPREGVFVSNGTHWFVTQRNFYEPQIITTDNTFVSGNCDVVIGIVNNTVYDPLQPELDSFKEELDKYFKNHTSPDVDLGDISGINASVVNIQKEIDRLNEVAKNLNESLIDLQELGKYEQGSGYIPEAPRDGQAYVRKDGEWVLLSTFLGRSLEVLFQGPGSLPETGGGSDYKDDDDKGGGGSGGGGSGGGGSGGGGSGGGGSHHHHHH

SEQ ID NO: 129 - protein, 1297 aa, Artificial Sequence
  SEQ ID NO:3 + A942P + A892P + N532P
MFVFLVLLPLVSSQCVNLTTRTQLPPAYTNSFTRGVYYPDKVFRSSVLHSTQDLFLPFFSNVTWFHAIHVSGTNGTKRFDNPVLPFNDGVYFASTEKSNIIRGWIFGTTLDSKTQSLLIVNNATNVVIKVCEFQFCNDPFLGVYYHKNNKSWMESEFRVYSSANNCTFEYVSQPFLMDLEGKQGNFKNLREFVFKNIDGYFKIYSKHTPINLVRDLPQGFSALEPLVDLPIGINITRFQTLLALHRSYLTPGDSSSGWTAGAAAYYVGYLQPRTFLLKYNENGTITDAVDCALDPLSETKCTLKSFTVEKGIYQTSNFRVQPTESIVRFPNITNLCPFGEVFNATRFASVYAWNRKRISNCVADYSVLYNSASFSTFKCYGVSPTKLNDLCFTNVYADSFVIRGDEVRQIAPGQTGKIADYNYKLPDDFTGCVIAWNSNNLDSKVGGNYNYLYRLFRKSNLKPFERDISTEIYQAGSTPCNGVEGFNCYFPLQSYGFQPTNGVGYQPYRVVVLSFELLHAPATVCGPKKSTPLVKNKCVNFNFNGLTGTGVLTESNKKFLPFQQFGRDIADTTDAVRDPQTLEILDITPCSFGGVSVITPGTNTSNQVAVLYQDVNCTEVPVAIHADQLTPTWRVYSTGSNVFQTRAGCLIGAEHVNNSYECDIPIGAGICASYQTQTNSPSRAGSVASQSIIAYTMSLGAENSVAYSNNSIAIPTNFTISVTTEILPVSMTKTSVDCTMYICGDSTECSNLLLQYGSFCTQLNRALTGIAVEQDKNTQEVFAQVKQIYKTPPIKDFGGFNFSQILPDPSKPSKRSFIEDLLFNKVTLADAGFIKQYGDCLGDIAARDLICAQKFNGLTVLPPLLTDEMIAQYTSALLAGTITSGWTFGAGPALQIPFAMQMAYRFNGIGVTQNVLYENQKLIANQFNSAIGKIQDSLSSTPSALGKLQDVVNQNAQALNTLVKQLSSNFGAISSVLNDILSRLDPPEAEVQIDRLITGRLQSLQTYVTQQLIRAAEIRASANLAATKMSECVLGQSKRVDFCGKGYHLMSFPQSAPHGVVFLHVTYVPAQEKNFTTAPAICHDGKAHFPREGVFVSNGTHWFVTQRNFYEPQIITTDNTFVSGNCDVVIGIVNNTVYDPLQPELDSFKEELDKYFKNHTSPDVDLGDISGINASVVNIQKEIDRLNEVAKNLNESLIDLQELGKYEQGSGYIPEAPRDGQAYVRKDGEWVLLSTFLGRSLEVLFQGPGSLPETGGGSDYKDDDDKGGGGSGGGGSGGGGSGGGGSGGGGSHHHHHH

SEQ ID NO: 130 - protein, 1297 aa, Artificial Sequence
  SEQ ID NO:3 + A942P + A892P + G880C + F888C
MFVFLVLLPLVSSQCVNLTTRTQLPPAYTNSFTRGVYYPDKVFRSSVLHSTQDLFLPFFSNVTWFHAIHVSGTNGTKRFDNPVLPFNDGVYFASTEKSNIIRGWIFGTTLDSKTQSLLIVNNATNVVIKVCEFQFCNDPFLGVYYHKNNKSWMESEFRVYSSANNCTFEYVSQPFLMDLEGKQGNFKNLREFVFKNIDGYFKIYSKHTPINLVRDLPQGFSALEPLVDLPIGINITRFQTLLALHRSYLTPGDSSSGWTAGAAAYYVGYLQPRTFLLKYNENGTITDAVDCALDPLSETKCTLKSFTVEKGIYQTSNFRVQPTESIVRFPNITNLCPFGEVFNATRFASVYAWNRKRISNCVADYSVLYNSASFSTFKCYGVSPTKLNDLCFTNVYADSFVIRGDEVRQIAPGQTGKIADYNYKLPDDFTGCVIAWNSNNLDSKVGGNYNYLYRLFRKSNLKPFERDISTEIYQAGSTPCNGVEGFNCYFPLQSYGFQPTNGVGYQPYRVVVLSFELLHAPATVCGPKKSTNLVKNKCVNFNFNGLTGTGVLTESNKKFLPFQQFGRDIADTTDAVRDPQTLEILDITPCSFGGVSVITPGTNTSNQVAVLYQDVNCTEVPVAIHADQLTPTWRVYSTGSNVFQTRAGCLIGAEHVNNSYECDIPIGAGICASYQTQTNSPSRAGSVASQSIIAYTMSLGAENSVAYSNNSIAIPTNFTISVTTEILPVSMTKTSVDCTMYICGDSTECSNLLLQYGSFCTQLNRALTGIAVEQDKNTQEVFAQVKQIYKTPPIKDFGGFNFSQILPDPSKPSKRSFIEDLLFNKVTLADAGFIKQYGDCLGDIAARDLICAQKFNGLTVLPPLLTDEMIAQYTSALLACTITSGWTCGAGPALQIPFAMQMAYRFNGIGVTQNVLYENQKLIANQFNSAIGKIQDSLSSTPSALGKLQDVVNQNAQALNTLVKQLSSNFGAISSVLNDILSRLDPPEAEVQIDRLITGRLQSLQTYVTQQLIRAAEIRASANLAATKMSECVLGQSKRVDFCGKGYHLMSFPQSAPHGVVFLHVTYVPAQEKNFTTAPAICHDGKAHFPREGVFVSNGTHWFVTQRNFYEPQIITTDNTFVSGNCDVVIGIVNNTVYDPLQPELDSFKEELDKYFKNHTSPDVDLGDISGINASVVNIQKEIDRLNEVAKNLNESLIDLQELGKYEQGSGYIPEAPRDGQAYVRKDGEWVLLSTFLGRSLEVLFQGPGSLPETGGGSDYKDDDDKGGGGSGGGGSGGGGSGGGGSGGGGSHHHHHH

SEQ ID NO: 131 - protein, 1297 aa, Artificial Sequence
  SEQ ID NO:3 + A942P + A892P + S884C + A893C
MFVFLVLLPLVSSQCVNLTTRTQLPPAYTNSFTRGVYYPDKVFRSSVLHSTQDLFLPFFSNVTWFHAIHVSGTNGTKRFDNPVLPFNDGVYFASTEKSNIIRGWIFGTTLDSKTQSLLIVNNATNVVIKVCEFQFCNDPFLGVYYHKNNKSWMESEFRVYSSANNCTFEYVSQPFLMDLEGKQGNFKNLREFVFKNIDGYFKIYSKHTPINLVRDLPQGFSALEPLVDLPIGINITRFQTLLALHRSYLTPGDSSSGWTAGAAAYYVGYLQPRTFLLKYNENGTITDAVDCALDPLSETKCTLKSFTVEKGIYQTSNFRVQPTESIVRFPNITNLCPFGEVFNATRFASVYAWNRKRISNCVADYSVLYNSASFSTFKCYGVSPTKLNDLCFTNVYADSFVIRGDEVRQIAPGQTGKIADYNYKLPDDFTGCVIAWNSNNLDSKVGGNYNYLYRLFRKSNLKPFERDISTEIYQAGSTPCNGVEGFNCYFPLQSYGFQPTNGVGYQPYRVVVLSFELLHAPATVCGPKKSTNLVKNKCVNFNFNGLTGTGVLTESNKKFLPFQQFGRDIADTTDAVRDPQTLEILDITPCSFGGVSVITPGTNTSNQVAVLYQDVNCTEVPVAIHADQLTPTWRVYSTGSNVFQTRAGCLIGAEHVNNSYECDIPIGAGICASYQTQTNSPSRAGSVASQSIIAYTMSLGAENSVAYSNNSIAIPTNFTISVTTEILPVSMTKTSVDCTMYICGDSTECSNLLLQYGSFCTQLNRALTGIAVEQDKNTQEVFAQVKQIYKTPPIKDFGGFNFSQILPDPSKPSKRSFIEDLLFNKVTLADAGFIKQYGDCLGDIAARDLICAQKFNGLTVLPPLLTDEMIAQYTSALLAGTITCGWTFGAGPCLQIPFAMQMAYRFNGIGVTQNVLYENQKLIANQFNSAIGKIQDSLSSTPSALGKLQDVVNQNAQALNTLVKQLSSNFGAISSVLNDILSRLDPPEAEVQIDRLITGRLQSLQTYVTQQLIRAAEIRASANLAATKMSECVLGQSKRVDFCGKGYHLMSFPQSAPHGVVFLHVTYVPAQEKNFTTAPAICHDGKAHFPREGVFVSNGTHWFVTQRNFYEPQIITTDNTFVSGNCDVVIGIVNNTVYDPLQPELDSFKEELDKYFKNHTSPDVDLGDISGINASVVNIQKEIDRLNEVAKNLNESLIDLQELGKYEQGSGYIPEAPRDGQAYVRKDGEWVLLSTFLGRSLEVLFQGPGSLPETGGGSDYKDDDDKGGGGSGGGGSGGGGSGGGGSGGGGSHHHHHH

SEQ ID NO: 132 - protein, 1297 aa, Artificial Sequence
  SEQ ID NO:3 + A942P + D614N + T572I
MFVFLVLLPLVSSQCVNLTTRTQLPPAYTNSFTRGVYYPDKVFRSSVLHSTQDLFLPFFSNVTWFHAIHVSGTNGTKRFDNPVLPFNDGVYFASTEKSNIIRGWIFGTTLDSKTQSLLIVNNATNVVIKVCEFQFCNDPFLGVYYHKNNKSWMESEFRVYSSANNCTFEYVSQPFLMDLEGKQGNFKNLREFVFKNIDGYFKIYSKHTPINLVRDLPQGFSALEPLVDLPIGINITRFQTLLALHRSYLTPGDSSSGWTAGAAAYYVGYLQPRTFLLKYNENGTITDAVDCALDPLSETKCTLKSFTVEKGIYQTSNFRVQPTESIVRFPNITNLCPFGEVFNATRFASVYAWNRKRISNCVADYSVLYNSASFSTFKCYGVSPTKLNDLCFTNVYADSFVIRGDEVRQIAPGQTGKIADYNYKLPDDFTGCVIAWNSNNLDSKVGGNYNYLYRLFRKSNLKPFERDISTEIYQAGSTPCNGVEGFNCYFPLQSYGFQPTNGVGYQPYRVVVLSFELLHAPATVCGPKKSTNLVKNKCVNFNFNGLTGTGVLTESNKKFLPFQQFGRDIADITDAVRDPQTLEILDITPCSFGGVSVITPGTNTSNQVAVLYQNVNCTEVPVAIHADQLTPTWRVYSTGSNVFQTRAGCLIGAEHVNNSYECDIPIGAGICASYQTQTNSPSRAGSVASQSIIAYTMSLGAENSVAYSNNSIAIPTNFTISVTTEILPVSMTKTSVDCTMYICGDSTECSNLLLQYGSFCTQLNRALTGIAVEQDKNTQEVFAQVKQIYKTPPIKDFGGFNFSQILPDPSKPSKRSFIEDLLFNKVTLADAGFIKQYGDCLGDIAARDLICAQKFNGLTVLPPLLTDEMIAQYTSALLAGTITSGWTFGAGAALQIPFAMQMAYRFNGIGVTQNVLYENQKLIANQFNSAIGKIQDSLSSTPSALGKLQDVVNQNAQALNTLVKQLSSNFGAISSVLNDILSRLDPPEAEVQIDRLITGRLQSLQTYVTQQLIRAAEIRASANLAATKMSECVLGQSKRVDFCGKGYHLMSFPQSAPHGVVFLHVTYVPAQEKNFTTAPAICHDGKAHFPREGVFVSNGTHWFVTQRNFYEPQIITTDNTFVSGNCDVVIGIVNNTVYDPLQPELDSFKEELDKYFKNHTSPDVDLGDISGINASVVNIQKEIDRLNEVAKNLNESLIDLQELGKYEQGSGYIPEAPRDGQAYVRKDGEWVLLSTFLGRSLEVLFQGPGSLPETGGGSDYKDDDDKGGGGSGGGGSGGGGSGGGGSGGGGSHHHHHH

SEQ ID NO: 133 - protein, 1297 aa, Artificial Sequence
  SEQ ID NO:3 + A942P + D614N + N532P
MFVFLVLLPLVSSQCVNLTTRTQLPPAYTNSFTRGVYYPDKVFRSSVLHSTQDLFLPFFSNVTWFHAIHVSGTNGTKRFDNPVLPFNDGVYFASTEKSNIIRGWIFGTTLDSKTQSLLIVNNATNVVIKVCEFQFCNDPFLGVYYHKNNKSWMESEFRVYSSANNCTFEYVSQPFLMDLEGKQGNFKNLREFVFKNIDGYFKIYSKHTPINLVRDLPQGFSALEPLVDLPIGINITRFQTLLALHRSYLTPGDSSSGWTAGAAAYYVGYLQPRTFLLKYNENGTITDAVDCALDPLSETKCTLKSFTVEKGIYQTSNFRVQPTESIVRFPNITNLCPFGEVFNATRFASVYAWNRKRISNCVADYSVLYNSASFSTFKCYGVSPTKLNDLCFTNVYADSFVIRGDEVRQIAPGQTGKIADYNYKLPDDFTGCVIAWNSNNLDSKVGGNYNYLYRLFRKSNLKPFERDISTEIYQAGSTPCNGVEGFNCYFPLQSYGFQPTNGVGYQPYRVVVLSFELLHAPATVCGPKKSTPLVKNKCVNFNFNGLTGTGVLTESNKKFLPFQQFGRDIADTTDAVRDPQTLEILDITPCSFGGVSVITPGTNTSNQVAVLYQNVNCTEVPVAIHADQLTPTWRVYSTGSNVFQTRAGCLIGAEHVNNSYECDIPIGAGICASYQTQTNSPSRAGSVASQSIIAYTMSLGAENSVAYSNNSIAIPTNFTISVTTEILPVSMTKTSVDCTMYICGDSTECSNLLLQYGSFCTQLNRALTGIAVEQDKNTQEVFAQVKQIYKTPPIKDFGGFNFSQILPDPSKPSKRSFIEDLLFNKVTLADAGFIKQYGDCLGDIAARDLICAQKFNGLTVLPPLLTDEMIAQYTSALLAGTITSGWTFGAGAALQIPFAMQMAYRFNGIGVTQNVLYENQKLIANQFNSAIGKIQDSLSSTPSALGKLQDVVNQNAQALNTLVKQLSSNFGAISSVLNDILSRLDPPEAEVQIDRLITGRLQSLQTYVTQQLIRAAEIRASANLAATKMSECVLGQSKRVDFCGKGYHLMSFPQSAPHGVVFLHVTYVPAQEKNFTTAPAICHDGKAHFPREGVFVSNGTHWFVTQRNFYEPQIITTDNTFVSGNCDVVIGIVNNTVYDPLQPELDSFKEELDKYFKNHTSPDVDLGDISGINASVVNIQKEIDRLNEVAKNLNESLIDLQELGKYEQGSGYIPEAPRDGQAYVRKDGEWVLLSTFLGRSLEVLFQGPGSLPETGGGSDYKDDDDKGGGGSGGGGSGGGGSGGGGSGGGGSHHHHHH

SEQ ID NO: 134 - protein, 1297 aa, Artificial Sequence
  SEQ ID NO:3 + A942P + D614N + G880C + F888C
MFVFLVLLPLVSSQCVNLTTRTQLPPAYTNSFTRGVYYPDKVFRSSVLHSTQDLFLPFFSNVTWFHAIHVSGTNGTKRFDNPVLPFNDGVYFASTEKSNIIRGWIFGTTLDSKTQSLLIVNNATNVVIKVCEFQFCNDPFLGVYYHKNNKSWMESEFRVYSSANNCTFEYVSQPFLMDLEGKQGNFKNLREFVFKNIDGYFKIYSKHTPINLVRDLPQGFSALEPLVDLPIGINITRFQTLLALHRSYLTPGDSSSGWTAGAAAYYVGYLQPRTFLLKYNENGTITDAVDCALDPLSETKCTLKSFTVEKGIYQTSNFRVQPTESIVRFPNITNLCPFGEVFNATRFASVYAWNRKRISNCVADYSVLYNSASFSTFKCYGVSPTKLNDLCFTNVYADSFVIRGDEVRQIAPGQTGKIADYNYKLPDDFTGCVIAWNSNNLDSKVGGNYNYLYRLFRKSNLKPFERDISTEIYQAGSTPCNGVEGFNCYFPLQSYGFQPTNGVGYQPYRVVVLSFELLHAPATVCGPKKSTNLVKNKCVNFNFNGLTGTGVLTESNKKFLPFQQFGRDIADTTDAVRDPQTLEILDITPCSFGGVSVITPGTNTSNQVAVLYQNVNCTEVPVAIHADQLTPTWRVYSTGSNVFQTRAGCLIGAEHVNNSYECDIPIGAGICASYQTQTNSPSRAGSVASQSIIAYTMSLGAENSVAYSNNSIAIPTNFTISVTTEILPVSMTKTSVDCTMYICGDSTECSNLLLQYGSFCTQLNRALTGIAVEQDKNTQEVFAQVKQIYKTPPIKDFGGFNFSQILPDPSKPSKRSFIEDLLFNKVTLADAGFIKQYGDCLGDIAARDLICAQKFNGLTVLPPLLTDEMIAQYTSALLACTITSGWTCGAGAALQIPFAMQMAYRFNGIGVTQNVLYENQKLIANQFNSAIGKIQDSLSSTPSALGKLQDVVNQNAQALNTLVKQLSSNFGAISSVLNDILSRLDPPEAEVQIDRLITGRLQSLQTYVTQQLIRAAEIRASANLAATKMSECVLGQSKRVDFCGKGYHLMSFPQSAPHGVVFLHVTYVPAQEKNFTTAPAICHDGKAHFPREGVFVSNGTHWFVTQRNFYEPQIITTDNTFVSGNCDVVIGIVNNTVYDPLQPELDSFKEELDKYFKNHTSPDVDLGDISGINASVVNIQKEIDRLNEVAKNLNESLIDLQELGKYEQGSGYIPEAPRDGQAYVRKDGEWVLLSTFLGRSLEVLFQGPGSLPETGGGSDYKDDDDKGGGGSGGGGSGGGGSGGGGSGGGGSHHHHHH

SEQ ID NO: 135 - protein, 1297 aa, Artificial Sequence
  SEQ ID NO:3 + A942P + D614N + S884C + A893C
MFVFLVLLPLVSSQCVNLTTRTQLPPAYTNSFTRGVYYPDKVFRSSVLHSTQDLFLPFFSNVTWFHAIHVSGTNGTKRFDNPVLPFNDGVYFASTEKSNIIRGWIFGTTLDSKTQSLLIVNNATNVVIKVCEFQFCNDPFLGVYYHKNNKSWMESEFRVYSSANNCTFEYVSQPFLMDLEGKQGNFKNLREFVFKNIDGYFKIYSKHTPINLVRDLPQGFSALEPLVDLPIGINITRFQTLLALHRSYLTPGDSSSGWTAGAAAYYVGYLQPRTFLLKYNENGTITDAVDCALDPLSETKCTLKSFTVEKGIYQTSNFRVQPTESIVRFPNITNLCPFGEVFNATRFASVYAWNRKRISNCVADYSVLYNSASFSTFKCYGVSPTKLNDLCFTNVYADSFVIRGDEVRQIAPGQTGKIADYNYKLPDDFTGCVIAWNSNNLDSKVGGNYNYLYRLFRKSNLKPFERDISTEIYQAGSTPCNGVEGFNCYFPLQSYGFQPTNGVGYQPYRVVVLSFELLHAPATVCGPKKSTNLVKNKCVNFNFNGLTGTGVLTESNKKFLPFQQFGRDIADTTDAVRDPQTLEILDITPCSFGGVSVITPGTNTSNQVAVLYQNVNCTEVPVAIHADQLTPTWRVYSTGSNVFQTRAGCLIGAEHVNNSYECDIPIGAGICASYQTQTNSPSRAGSVASQSIIAYTMSLGAENSVAYSNNSIAIPTNFTISVTTEILPVSMTKTSVDCTMYICGDSTECSNLLLQYGSFCTQLNRALTGIAVEQDKNTQEVFAQVKQIYKTPPIKDFGGFNFSQILPDPSKPSKRSFIEDLLFNKVTLADAGFIKQYGDCLGDIAARDLICAQKFNGLTVLPPLLTDEMIAQYTSALLAGTITCGWTFGAGACLQIPFAMQMAYRFNGIGVTQNVLYENQKLIANQFNSAIGKIQDSLSSTPSALGKLQDVVNQNAQALNTLVKQLSSNFGAISSVLNDILSRLDPPEAEVQIDRLITGRLQSLQTYVTQQLIRAAEIRASANLAATKMSECVLGQSKRVDFCGKGYHLMSFPQSAPHGVVFLHVTYVPAQEKNFTTAPAICHDGKAHFPREGVFVSNGTHWFVTQRNFYEPQIITTDNTFVSGNCDVVIGIVNNTVYDPLQPELDSFKEELDKYFKNHTSPDVDLGDISGINASVVNIQKEIDRLNEVAKNLNESLIDLQELGKYEQGSGYIPEAPRDGQAYVRKDGEWVLLSTFLGRSLEVLFQGPGSLPETGGGSDYKDDDDKGGGGSGGGGSGGGGSGGGGSGGGGSHHHHHH

SEQ ID NO: 136 - protein, 1297 aa, Artificial Sequence
  SEQ ID NO:3 + A942P + T572I + N532P
MFVFLVLLPLVSSQCVNLTTRTQLPPAYTNSFTRGVYYPDKVFRSSVLHSTQDLFLPFFSNVTWFHAIHVSGTNGTKRFDNPVLPFNDGVYFASTEKSNIIRGWIFGTTLDSKTQSLLIVNNATNVVIKVCEFQFCNDPFLGVYYHKNNKSWMESEFRVYSSANNCTFEYVSQPFLMDLEGKQGNFKNLREFVFKNIDGYFKIYSKHTPINLVRDLPQGFSALEPLVDLPIGINITRFQTLLALHRSYLTPGDSSSGWTAGAAAYYVGYLQPRTFLLKYNENGTITDAVDCALDPLSETKCTLKSFTVEKGIYQTSNFRVQPTESIVRFPNITNLCPFGEVFNATRFASVYAWNRKRISNCVADYSVLYNSASFSTFKCYGVSPTKLNDLCFTNVYADSFVIRGDEVRQIAPGQTGKIADYNYKLPDDFTGCVIAWNSNNLDSKVGGNYNYLYRLFRKSNLKPFERDISTEIYQAGSTPCNGVEGFNCYFPLQSYGFQPTNGVGYQPYRVVVLSFELLHAPATVCGPKKSTPLVKNKCVNFNFNGLTGTGVLTESNKKFLPFQQFGRDIADITDAVRDPQTLEILDITPCSFGGVSVITPGTNTSNQVAVLYQDVNCTEVPVAIHADQLTPTWRVYSTGSNVFQTRAGCLIGAEHVNNSYECDIPIGAGICASYQTQTNSPSRAGSVASQSIIAYTMSLGAENSVAYSNNSIAIPTNFTISVTTEILPVSMTKTSVDCTMYICGDSTECSNLLLQYGSFCTQLNRALTGIAVEQDKNTQEVFAQVKQIYKTPPIKDFGGFNFSQILPDPSKPSKRSFIEDLLFNKVTLADAGFIKQYGDCLGDIAARDLICAQKFNGLTVLPPLLTDEMIAQYTSALLAGTITSGWTFGAGAALQIPFAMQMAYRFNGIGVTQNVLYENQKLIANQFNSAIGKIQDSLSSTPSALGKLQDVVNQNAQALNTLVKQLSSNFGAISSVLNDILSRLDPPEAEVQIDRLITGRLQSLQTYVTQQLIRAAEIRASANLAATKMSECVLGQSKRVDFCGKGYHLMSFPQSAPHGVVFLHVTYVPAQEKNFTTAPAICHDGKAHFPREGVFVSNGTHWFVTQRNFYEPQIITTDNTFVSGNCDVVIGIVNNTVYDPLQPELDSFKEELDKYFKNHTSPDVDLGDISGINASVVNIQKEIDRLNEVAKNLNESLIDLQELGKYEQGSGYIPEAPRDGQAYVRKDGEWVLLSTFLGRSLEVLFQGPGSLPETGGGSDYKDDDDKGGGGSGGGGSGGGGSGGGGSGGGGSHHHHHH

SEQ ID NO: 137 - protein, 1297 aa, Artificial Sequence
  SEQ ID NO:3 + A942P + T572I + G880C + F888C
MFVFLVLLPLVSSQCVNLTTRTQLPPAYTNSFTRGVYYPDKVFRSSVLHSTQDLFLPFFSNVTWFHAIHVSGTNGTKRFDNPVLPFNDGVYFASTEKSNIIRGWIFGTTLDSKTQSLLIVNNATNVVIKVCEFQFCNDPFLGVYYHKNNKSWMESEFRVYSSANNCTFEYVSQPFLMDLEGKQGNFKNLREFVFKNIDGYFKIYSKHTPINLVRDLPQGFSALEPLVDLPIGINITRFQTLLALHRSYLTPGDSSSGWTAGAAAYYVGYLQPRTFLLKYNENGTITDAVDCALDPLSETKCTLKSFTVEKGIYQTSNFRVQPTESIVRFPNITNLCPFGEVFNATRFASVYAWNRKRISNCVADYSVLYNSASFSTFKCYGVSPTKLNDLCFTNVYADSFVIRGDEVRQIAPGQTGKIADYNYKLPDDFTGCVIAWNSNNLDSKVGGNYNYLYRLFRKSNLKPFERDISTEIYQAGSTPCNGVEGFNCYFPLQSYGFQPTNGVGYQPYRVVVLSFELLHAPATVCGPKKSTNLVKNKCVNFNFNGLTGTGVLTESNKKFLPFQQFGRDIADITDAVRDPQTLEILDITPCSFGGVSVITPGTNTSNQVAVLYQDVNCTEVPVAIHADQLTPTWRVYSTGSNVFQTRAGCLIGAEHVNNSYECDIPIGAGICASYQTQTNSPSRAGSVASQSIIAYTMSLGAENSVAYSNNSIAIPTNFTISVTTEILPVSMTKTSVDCTMYICGDSTECSNLLLQYGSFCTQLNRALTGIAVEQDKNTQEVFAQVKQIYKTPPIKDFGGFNFSQILPDPSKPSKRSFIEDLLFNKVTLADAGFIKQYGDCLGDIAARDLICAQKFNGLTVLPPLLTDEMIAQYTSALLACTITSGWTCGAGAALQIPFAMQMAYRFNGIGVTQNVLYENQKLIANQFNSAIGKIQDSLSSTPSALGKLQDVVNQNAQALNTLVKQLSSNFGAISSVLNDILSRLDPPEAEVQIDRLITGRLQSLQTYVTQQLIRAAEIRASANLAATKMSECVLGQSKRVDFCGKGYHLMSFPQSAPHGVVFLHVTYVPAQEKNFTTAPAICHDGKAHFPREGVFVSNGTHWFVTQRNFYEPQIITTDNTFVSGNCDVVIGIVNNTVYDPLQPELDSFKEELDKYFKNHTSPDVDLGDISGINASVVNIQKEIDRLNEVAKNLNESLIDLQELGKYEQGSGYIPEAPRDGQAYVRKDGEWVLLSTFLGRSLEVLFQGPGSLPETGGGSDYKDDDDKGGGGSGGGGSGGGGSGGGGSGGGGSHHHHHH

SEQ ID NO: 138 - protein, 1297 aa, Artificial Sequence
  SEQ ID NO:3 + A942P + T572I + S884C + A893C
MFVFLVLLPLVSSQCVNLTTRTQLPPAYTNSFTRGVYYPDKVFRSSVLHSTQDLFLPFFSNVTWFHAIHVSGTNGTKRFDNPVLPFNDGVYFASTEKSNIIRGWIFGTTLDSKTQSLLIVNNATNVVIKVCEFQFCNDPFLGVYYHKNNKSWMESEFRVYSSANNCTFEYVSQPFLMDLEGKQGNFKNLREFVFKNIDGYFKIYSKHTPINLVRDLPQGFSALEPLVDLPIGINITRFQTLLALHRSYLTPGDSSSGWTAGAAAYYVGYLQPRTFLLKYNENGTITDAVDCALDPLSETKCTLKSFTVEKGIYQTSNFRVQPTESIVRFPNITNLCPFGEVFNATRFASVYAWNRKRISNCVADYSVLYNSASFSTFKCYGVSPTKLNDLCFTNVYADSFVIRGDEVRQIAPGQTGKIADYNYKLPDDFTGCVIAWNSNNLDSKVGGNYNYLYRLFRKSNLKPFERDISTEIYQAGSTPCNGVEGFNCYFPLQSYGFQPTNGVGYQPYRVVVLSFELLHAPATVCGPKKSTNLVKNKCVNFNFNGLTGTGVLTESNKKFLPFQQFGRDIADITDAVRDPQTLEILDITPCSFGGVSVITPGTNTSNQVAVLYQDVNCTEVPVAIHADQLTPTWRVYSTGSNVFQTRAGCLIGAEHVNNSYECDIPIGAGICASYQTQTNSPSRAGSVASQSIIAYTMSLGAENSVAYSNNSIAIPTNFTISVTTEILPVSMTKTSVDCTMYICGDSTECSNLLLQYGSFCTQLNRALTGIAVEQDKNTQEVFAQVKQIYKTPPIKDFGGFNFSQILPDPSKPSKRSFIEDLLFNKVTLADAGFIKQYGDCLGDIAARDLICAQKFNGLTVLPPLLTDEMIAQYTSALLAGTITCGWTFGAGACLQIPFAMQMAYRFNGIGVTQNVLYENQKLIANQFNSAIGKIQDSLSSTPSALGKLQDVVNQNAQALNTLVKQLSSNFGAISSVLNDILSRLDPPEAEVQIDRLITGRLQSLQTYVTQQLIRAAEIRASANLAATKMSECVLGQSKRVDFCGKGYHLMSFPQSAPHGVVFLHVTYVPAQEKNFTTAPAICHDGKAHFPREGVFVSNGTHWFVTQRNFYEPQIITTDNTFVSGNCDVVIGIVNNTVYDPLQPELDSFKEELDKYFKNHTSPDVDLGDISGINASVVNIQKEIDRLNEVAKNLNESLIDLQELGKYEQGSGYIPEAPRDGQAYVRKDGEWVLLSTFLGRSLEVLFQGPGSLPETGGGSDYKDDDDKGGGGSGGGGSGGGGSGGGGSGGGGSHHHHHH

SEQ ID NO: 139 - protein, 1297 aa, Artificial Sequence
  SEQ ID NO:3 + A942P + N532P + G880C + F888C
MFVFLVLLPLVSSQCVNLTTRTQLPPAYTNSFTRGVYYPDKVFRSSVLHSTQDLFLPFFSNVTWFHAIHVSGTNGTKRFDNPVLPFNDGVYFASTEKSNIIRGWIFGTTLDSKTQSLLIVNNATNVVIKVCEFQFCNDPFLGVYYHKNNKSWMESEFRVYSSANNCTFEYVSQPFLMDLEGKQGNFKNLREFVFKNIDGYFKIYSKHTPINLVRDLPQGFSALEPLVDLPIGINITRFQTLLALHRSYLTPGDSSSGWTAGAAAYYVGYLQPRTFLLKYNENGTITDAVDCALDPLSETKCTLKSFTVEKGIYQTSNFRVQPTESIVRFPNITNLCPFGEVFNATRFASVYAWNRKRISNCVADYSVLYNSASFSTFKCYGVSPTKLNDLCFTNVYADSFVIRGDEVRQIAPGQTGKIADYNYKLPDDFTGCVIAWNSNNLDSKVGGNYNYLYRLFRKSNLKPFERDISTEIYQAGSTPCNGVEGFNCYFPLQSYGFQPTNGVGYQPYRVVVLSFELLHAPATVCGPKKSTPLVKNKCVNFNFNGLTGTGVLTESNKKFLPFQQFGRDIADTTDAVRDPQTLEILDITPCSFGGVSVITPGTNTSNQVAVLYQDVNCTEVPVAIHADQLTPTWRVYSTGSNVFQTRAGCLIGAEHVNNSYECDIPIGAGICASYQTQTNSPSRAGSVASQSIIAYTMSLGAENSVAYSNNSIAIPTNFTISVTTEILPVSMTKTSVDCTMYICGDSTECSNLLLQYGSFCTQLNRALTGIAVEQDKNTQEVFAQVKQIYKTPPIKDFGGFNFSQILPDPSKPSKRSFIEDLLFNKVTLADAGFIKQYGDCLGDIAARDLICAQKFNGLTVLPPLLTDEMIAQYTSALLACTITSGWTCGAGAALQIPFAMQMAYRFNGIGVTQNVLYENQKLIANQFNSAIGKIQDSLSSTPSALGKLQDVVNQNAQALNTLVKQLSSNFGAISSVLNDILSRLDPPEAEVQIDRLITGRLQSLQTYVTQQLIRAAEIRASANLAATKMSECVLGQSKRVDFCGKGYHLMSFPQSAPHGVVFLHVTYVPAQEKNFTTAPAICHDGKAHFPREGVFVSNGTHWFVTQRNFYEPQIITTDNTFVSGNCDVVIGIVNNTVYDPLQPELDSFKEELDKYFKNHTSPDVDLGDISGINASVVNIQKEIDRLNEVAKNLNESLIDLQELGKYEQGSGYIPEAPRDGQAYVRKDGEWVLLSTFLGRSLEVLFQGPGSLPETGGGSDYKDDDDKGGGGSGGGGSGGGGSGGGGSGGGGSHHHHHH

SEQ ID NO: 140 - protein, 1297 aa, Artificial Sequence
  SEQ ID NO:3 + A942P + N532P + S884C + A893C
MFVFLVLLPLVSSQCVNLTTRTQLPPAYTNSFTRGVYYPDKVFRSSVLHSTQDLFLPFFSNVTWFHAIHVSGTNGTKRFDNPVLPFNDGVYFASTEKSNIIRGWIFGTTLDSKTQSLLIVNNATNVVIKVCEFQFCNDPFLGVYYHKNNKSWMESEFRVYSSANNCTFEYVSQPFLMDLEGKQGNFKNLREFVFKNIDGYFKIYSKHTPINLVRDLPQGFSALEPLVDLPIGINITRFQTLLALHRSYLTPGDSSSGWTAGAAAYYVGYLQPRTFLLKYNENGTITDAVDCALDPLSETKCTLKSFTVEKGIYQTSNFRVQPTESIVRFPNITNLCPFGEVFNATRFASVYAWNRKRISNCVADYSVLYNSASFSTFKCYGVSPTKLNDLCFTNVYADSFVIRGDEVRQIAPGQTGKIADYNYKLPDDFTGCVIAWNSNNLDSKVGGNYNYLYRLFRKSNLKPFERDISTEIYQAGSTPCNGVEGFNCYFPLQSYGFQPTNGVGYQPYRVVVLSFELLHAPATVCGPKKSTPLVKNKCVNFNFNGLTGTGVLTESNKKFLPFQQFGRDIADTTDAVRDPQTLEILDITPCSFGGVSVITPGTNTSNQVAVLYQDVNCTEVPVAIHADQLTPTWRVYSTGSNVFQTRAGCLIGAEHVNNSYECDIPIGAGICASYQTQTNSPSRAGSVASQSIIAYTMSLGAENSVAYSNNSIAIPTNFTISVTTEILPVSMTKTSVDCTMYICGDSTECSNLLLQYGSFCTQLNRALTGIAVEQDKNTQEVFAQVKQIYKTPPIKDFGGFNFSQILPDPSKPSKRSFIEDLLFNKVTLADAGFIKQYGDCLGDIAARDLICAQKFNGLTVLPPLLTDEMIAQYTSALLAGTITCGWTFGAGACLQIPFAMQMAYRFNGIGVTQNVLYENQKLIANQFNSAIGKIQDSLSSTPSALGKLQDVVNQNAQALNTLVKQLSSNFGAISSVLNDILSRLDPPEAEVQIDRLITGRLQSLQTYVTQQLIRAAEIRASANLAATKMSECVLGQSKRVDFCGKGYHLMSFPQSAPHGVVFLHVTYVPAQEKNFTTAPAICHDGKAHFPREGVFVSNGTHWFVTQRNFYEPQIITTDNTFVSGNCDVVIGIVNNTVYDPLQPELDSFKEELDKYFKNHTSPDVDLGDISGINASVVNIQKEIDRLNEVAKNLNESLIDLQELGKYEQGSGYIPEAPRDGQAYVRKDGEWVLLSTFLGRSLEVLFQGPGSLPETGGGSDYKDDDDKGGGGSGGGGSGGGGSGGGGSGGGGSHHHHHH

SEQ ID NO: 141 - protein, 1297 aa, Artificial Sequence
  SEQ ID NO:3 + A892P + D614N + T572I
MFVFLVLLPLVSSQCVNLTTRTQLPPAYTNSFTRGVYYPDKVFRSSVLHSTQDLFLPFFSNVTWFHAIHVSGTNGTKRFDNPVLPFNDGVYFASTEKSNIIRGWIFGTTLDSKTQSLLIVNNATNVVIKVCEFQFCNDPFLGVYYHKNNKSWMESEFRVYSSANNCTFEYVSQPFLMDLEGKQGNFKNLREFVFKNIDGYFKIYSKHTPINLVRDLPQGFSALEPLVDLPIGINITRFQTLLALHRSYLTPGDSSSGWTAGAAAYYVGYLQPRTFLLKYNENGTITDAVDCALDPLSETKCTLKSFTVEKGIYQTSNFRVQPTESIVRFPNITNLCPFGEVFNATRFASVYAWNRKRISNCVADYSVLYNSASFSTFKCYGVSPTKLNDLCFTNVYADSFVIRGDEVRQIAPGQTGKIADYNYKLPDDFTGCVIAWNSNNLDSKVGGNYNYLYRLFRKSNLKPFERDISTEIYQAGSTPCNGVEGFNCYFPLQSYGFQPTNGVGYQPYRVVVLSFELLHAPATVCGPKKSTNLVKNKCVNFNFNGLTGTGVLTESNKKFLPFQQFGRDIADITDAVRDPQTLEILDITPCSFGGVSVITPGTNTSNQVAVLYQNVNCTEVPVAIHADQLTPTWRVYSTGSNVFQTRAGCLIGAEHVNNSYECDIPIGAGICASYQTQTNSPSRAGSVASQSIIAYTMSLGAENSVAYSNNSIAIPTNFTISVTTEILPVSMTKTSVDCTMYICGDSTECSNLLLQYGSFCTQLNRALTGIAVEQDKNTQEVFAQVKQIYKTPPIKDFGGFNFSQILPDPSKPSKRSFIEDLLFNKVTLADAGFIKQYGDCLGDIAARDLICAQKFNGLTVLPPLLTDEMIAQYTSALLAGTITSGWTFGAGPALQIPFAMQMAYRFNGIGVTQNVLYENQKLIANQFNSAIGKIQDSLSSTASALGKLQDVVNQNAQALNTLVKQLSSNFGAISSVLNDILSRLDPPEAEVQIDRLITGRLQSLQTYVTQQLIRAAEIRASANLAATKMSECVLGQSKRVDFCGKGYHLMSFPQSAPHGVVFLHVTYVPAQEKNFTTAPAICHDGKAHFPREGVFVSNGTHWFVTQRNFYEPQIITTDNTFVSGNCDVVIGIVNNTVYDPLQPELDSFKEELDKYFKNHTSPDVDLGDISGINASVVNIQKEIDRLNEVAKNLNESLIDLQELGKYEQGSGYIPEAPRDGQAYVRKDGEWVLLSTFLGRSLEVLFQGPGSLPETGGGSDYKDDDDKGGGGSGGGGSGGGGSGGGGSGGGGSHHHHHH

SEQ ID NO: 142 - protein, 1297 aa, Artificial Sequence
  SEQ ID NO:3 + A892P + D614N + N532P
MFVFLVLLPLVSSQCVNLTTRTQLPPAYTNSFTRGVYYPDKVFRSSVLHSTQDLFLPFFSNVTWFHAIHVSGTNGTKRFDNPVLPFNDGVYFASTEKSNIIRGWIFGTTLDSKTQSLLIVNNATNVVIKVCEFQFCNDPFLGVYYHKNNKSWMESEFRVYSSANNCTFEYVSQPFLMDLEGKQGNFKNLREFVFKNIDGYFKIYSKHTPINLVRDLPQGFSALEPLVDLPIGINITRFQTLLALHRSYLTPGDSSSGWTAGAAAYYVGYLQPRTFLLKYNENGTITDAVDCALDPLSETKCTLKSFTVEKGIYQTSNFRVQPTESIVRFPNITNLCPFGEVFNATRFASVYAWNRKRISNCVADYSVLYNSASFSTFKCYGVSPTKLNDLCFTNVYADSFVIRGDEVRQIAPGQTGKIADYNYKLPDDFTGCVIAWNSNNLDSKVGGNYNYLYRLFRKSNLKPFERDISTEIYQAGSTPCNGVEGFNCYFPLQSYGFQPTNGVGYQPYRVVVLSFELLHAPATVCGPKKSTPLVKNKCVNFNFNGLTGTGVLTESNKKFLPFQQFGRDIADTTDAVRDPQTLEILDITPCSFGGVSVITPGTNTSNQVAVLYQNVNCTEVPVAIHADQLTPTWRVYSTGSNVFQTRAGCLIGAEHVNNSYECDIPIGAGICASYQTQTNSPSRAGSVASQSIIAYTMSLGAENSVAYSNNSIAIPTNFTISVTTEILPVSMTKTSVDCTMYICGDSTECSNLLLQYGSFCTQLNRALTGIAVEQDKNTQEVFAQVKQIYKTPPIKDFGGFNFSQILPDPSKPSKRSFIEDLLFNKVTLADAGFIKQYGDCLGDIAARDLICAQKFNGLTVLPPLLTDEMIAQYTSALLAGTITSGWTFGAGPALQIPFAMQMAYRFNGIGVTQNVLYENQKLIANQFNSAIGKIQDSLSSTASALGKLQDVVNQNAQALNTLVKQLSSNFGAISSVLNDILSRLDPPEAEVQIDRLITGRLQSLQTYVTQQLIRAAEIRASANLAATKMSECVLGQSKRVDFCGKGYHLMSFPQSAPHGVVFLHVTYVPAQEKNFTTAPAICHDGKAHFPREGVFVSNGTHWFVTQRNFYEPQIITTDNTFVSGNCDVVIGIVNNTVYDPLQPELDSFKEELDKYFKNHTSPDVDLGDISGINASVVNIQKEIDRLNEVAKNLNESLIDLQELGKYEQGSGYIPEAPRDGQAYVRKDGEWVLLSTFLGRSLEVLFQGPGSLPETGGGSDYKDDDDKGGGGSGGGGSGGGGSGGGGSGGGGSHHHHHH

SEQ ID NO: 143 - protein, 1297 aa, Artificial Sequence
  SEQ ID NO:3 + A892P + D614N + G880C + F888C
MFVFLVLLPLVSSQCVNLTTRTQLPPAYTNSFTRGVYYPDKVFRSSVLHSTQDLFLPFFSNVTWFHAIHVSGTNGTKRFDNPVLPFNDGVYFASTEKSNIIRGWIFGTTLDSKTQSLLIVNNATNVVIKVCEFQFCNDPFLGVYYHKNNKSWMESEFRVYSSANNCTFEYVSQPFLMDLEGKQGNFKNLREFVFKNIDGYFKIYSKHTPINLVRDLPQGFSALEPLVDLPIGINITRFQTLLALHRSYLTPGDSSSGWTAGAAAYYVGYLQPRTFLLKYNENGTITDAVDCALDPLSETKCTLKSFTVEKGIYQTSNFRVQPTESIVRFPNITNLCPFGEVFNATRFASVYAWNRKRISNCVADYSVLYNSASFSTFKCYGVSPTKLNDLCFTNVYADSFVIRGDEVRQIAPGQTGKIADYNYKLPDDFTGCVIAWNSNNLDSKVGGNYNYLYRLFRKSNLKPFERDISTEIYQAGSTPCNGVEGFNCYFPLQSYGFQPTNGVGYQPYRVVVLSFELLHAPATVCGPKKSTNLVKNKCVNFNFNGLTGTGVLTESNKKFLPFQQFGRDIADTTDAVRDPQTLEILDITPCSFGGVSVITPGTNTSNQVAVLYQNVNCTEVPVAIHADQLTPTWRVYSTGSNVFQTRAGCLIGAEHVNNSYECDIPIGAGICASYQTQTNSPSRAGSVASQSIIAYTMSLGAENSVAYSNNSIAIPTNFTISVTTEILPVSMTKTSVDCTMYICGDSTECSNLLLQYGSFCTQLNRALTGIAVEQDKNTQEVFAQVKQIYKTPPIKDFGGFNFSQILPDPSKPSKRSFIEDLLFNKVTLADAGFIKQYGDCLGDIAARDLICAQKFNGLTVLPPLLTDEMIAQYTSALLACTITSGWTCGAGPALQIPFAMQMAYRFNGIGVTQNVLYENQKLIANQFNSAIGKIQDSLSSTASALGKLQDVVNQNAQALNTLVKQLSSNFGAISSVLNDILSRLDPPEAEVQIDRLITGRLQSLQTYVTQQLIRAAEIRASANLAATKMSECVLGQSKRVDFCGKGYHLMSFPQSAPHGVVFLHVTYVPAQEKNFTTAPAICHDGKAHFPREGVFVSNGTHWFVTQRNFYEPQIITTDNTFVSGNCDVVIGIVNNTVYDPLQPELDSFKEELDKYFKNHTSPDVDLGDISGINASVVNIQKEIDRLNEVAKNLNESLIDLQELGKYEQGSGYIPEAPRDGQAYVRKDGEWVLLSTFLGRSLEVLFQGPGSLPETGGGSDYKDDDDKGGGGSGGGGSGGGGSGGGGSGGGGSHHHHHH

SEQ ID NO: 144 - protein, 1297 aa, Artificial Sequence
  SEQ ID NO:3 + A892P + D614N + S884C + A893C
MFVFLVLLPLVSSQCVNLTTRTQLPPAYTNSFTRGVYYPDKVFRSSVLHSTQDLFLPFFSNVTWFHAIHVSGTNGTKRFDNPVLPFNDGVYFASTEKSNIIRGWIFGTTLDSKTQSLLIVNNATNVVIKVCEFQFCNDPFLGVYYHKNNKSWMESEFRVYSSANNCTFEYVSQPFLMDLEGKQGNFKNLREFVFKNIDGYFKIYSKHTPINLVRDLPQGFSALEPLVDLPIGINITRFQTLLALHRSYLTPGDSSSGWTAGAAAYYVGYLQPRTFLLKYNENGTITDAVDCALDPLSETKCTLKSFTVEKGIYQTSNFRVQPTESIVRFPNITNLCPFGEVFNATRFASVYAWNRKRISNCVADYSVLYNSASFSTFKCYGVSPTKLNDLCFTNVYADSFVIRGDEVRQIAPGQTGKIADYNYKLPDDFTGCVIAWNSNNLDSKVGGNYNYLYRLFRKSNLKPFERDISTEIYQAGSTPCNGVEGFNCYFPLQSYGFQPTNGVGYQPYRVVVLSFELLHAPATVCGPKKSTNLVKNKCVNFNFNGLTGTGVLTESNKKFLPFQQFGRDIADTTDAVRDPQTLEILDITPCSFGGVSVITPGTNTSNQVAVLYQNVNCTEVPVAIHADQLTPTWRVYSTGSNVFQTRAGCLIGAEHVNNSYECDIPIGAGICASYQTQTNSPSRAGSVASQSIIAYTMSLGAENSVAYSNNSIAIPTNFTISVTTEILPVSMTKTSVDCTMYICGDSTECSNLLLQYGSFCTQLNRALTGIAVEQDKNTQEVFAQVKQIYKTPPIKDFGGFNFSQILPDPSKPSKRSFIEDLLFNKVTLADAGFIKQYGDCLGDIAARDLICAQKFNGLTVLPPLLTDEMIAQYTSALLAGTITCGWTFGAGPCLQIPFAMQMAYRFNGIGVTQNVLYENQKLIANQFNSAIGKIQDSLSSTASALGKLQDVVNQNAQALNTLVKQLSSNFGAISSVLNDILSRLDPPEAEVQIDRLITGRLQSLQTYVTQQLIRAAEIRASANLAATKMSECVLGQSKRVDFCGKGYHLMSFPQSAPHGVVFLHVTYVPAQEKNFTTAPAICHDGKAHFPREGVFVSNGTHWFVTQRNFYEPQIITTDNTFVSGNCDVVIGIVNNTVYDPLQPELDSFKEELDKYFKNHTSPDVDLGDISGINASVVNIQKEIDRLNEVAKNLNESLIDLQELGKYEQGSGYIPEAPRDGQAYVRKDGEWVLLSTFLGRSLEVLFQGPGSLPETGGGSDYKDDDDKGGGGSGGGGSGGGGSGGGGSGGGGSHHHHHH

SEQ ID NO: 145 - protein, 1297 aa, Artificial Sequence
  SEQ ID NO:3 + A892P + T572I + N532P
MFVFLVLLPLVSSQCVNLTTRTQLPPAYTNSFTRGVYYPDKVFRSSVLHSTQDLFLPFFSNVTWFHAIHVSGTNGTKRFDNPVLPFNDGVYFASTEKSNIIRGWIFGTTLDSKTQSLLIVNNATNVVIKVCEFQFCNDPFLGVYYHKNNKSWMESEFRVYSSANNCTFEYVSQPFLMDLEGKQGNFKNLREFVFKNIDGYFKIYSKHTPINLVRDLPQGFSALEPLVDLPIGINITRFQTLLALHRSYLTPGDSSSGWTAGAAAYYVGYLQPRTFLLKYNENGTITDAVDCALDPLSETKCTLKSFTVEKGIYQTSNFRVQPTESIVRFPNITNLCPFGEVFNATRFASVYAWNRKRISNCVADYSVLYNSASFSTFKCYGVSPTKLNDLCFTNVYADSFVIRGDEVRQIAPGQTGKIADYNYKLPDDFTGCVIAWNSNNLDSKVGGNYNYLYRLFRKSNLKPFERDISTEIYQAGSTPCNGVEGFNCYFPLQSYGFQPTNGVGYQPYRVVVLSFELLHAPATVCGPKKSTPLVKNKCVNFNFNGLTGTGVLTESNKKFLPFQQFGRDIADITDAVRDPQTLEILDITPCSFGGVSVITPGTNTSNQVAVLYQDVNCTEVPVAIHADQLTPTWRVYSTGSNVFQTRAGCLIGAEHVNNSYECDIPIGAGICASYQTQTNSPSRAGSVASQSIIAYTMSLGAENSVAYSNNSIAIPTNFTISVTTEILPVSMTKTSVDCTMYICGDSTECSNLLLQYGSFCTQLNRALTGIAVEQDKNTQEVFAQVKQIYKTPPIKDFGGFNFSQILPDPSKPSKRSFIEDLLFNKVTLADAGFIKQYGDCLGDIAARDLICAQKFNGLTVLPPLLTDEMIAQYTSALLAGTITSGWTFGAGPALQIPFAMQMAYRFNGIGVTQNVLYENQKLIANQFNSAIGKIQDSLSSTASALGKLQDVVNQNAQALNTLVKQLSSNFGAISSVLNDILSRLDPPEAEVQIDRLITGRLQSLQTYVTQQLIRAAEIRASANLAATKMSECVLGQSKRVDFCGKGYHLMSFPQSAPHGVVFLHVTYVPAQEKNFTTAPAICHDGKAHFPREGVFVSNGTHWFVTQRNFYEPQIITTDNTFVSGNCDVVIGIVNNTVYDPLQPELDSFKEELDKYFKNHTSPDVDLGDISGINASVVNIQKEIDRLNEVAKNLNESLIDLQELGKYEQGSGYIPEAPRDGQAYVRKDGEWVLLSTFLGRSLEVLFQGPGSLPETGGGSDYKDDDDKGGGGSGGGGSGGGGSGGGGSGGGGSHHHHHH

SEQ ID NO: 146 - protein, 1297 aa, Artificial Sequence
  SEQ ID NO:3 + A892P + T572I + G880C + F888C
MFVFLVLLPLVSSQCVNLTTRTQLPPAYTNSFTRGVYYPDKVFRSSVLHSTQDLFLPFFSNVTWFHAIHVSGTNGTKRFDNPVLPFNDGVYFASTEKSNIIRGWIFGTTLDSKTQSLLIVNNATNVVIKVCEFQFCNDPFLGVYYHKNNKSWMESEFRVYSSANNCTFEYVSQPFLMDLEGKQGNFKNLREFVFKNIDGYFKIYSKHTPINLVRDLPQGFSALEPLVDLPIGINITRFQTLLALHRSYLTPGDSSSGWTAGAAAYYVGYLQPRTFLLKYNENGTITDAVDCALDPLSETKCTLKSFTVEKGIYQTSNFRVQPTESIVRFPNITNLCPFGEVFNATRFASVYAWNRKRISNCVADYSVLYNSASFSTFKCYGVSPTKLNDLCFTNVYADSFVIRGDEVRQIAPGQTGKIADYNYKLPDDFTGCVIAWNSNNLDSKVGGNYNYLYRLFRKSNLKPFERDISTEIYQAGSTPCNGVEGFNCYFPLQSYGFQPTNGVGYQPYRVVVLSFELLHAPATVCGPKKSTNLVKNKCVNFNFNGLTGTGVLTESNKKFLPFQQFGRDIADITDAVRDPQTLEILDITPCSFGGVSVITPGTNTSNQVAVLYQDVNCTEVPVAIHADQLTPTWRVYSTGSNVFQTRAGCLIGAEHVNNSYECDIPIGAGICASYQTQTNSPSRAGSVASQSIIAYTMSLGAENSVAYSNNSIAIPTNFTISVTTEILPVSMTKTSVDCTMYICGDSTECSNLLLQYGSFCTQLNRALTGIAVEQDKNTQEVFAQVKQIYKTPPIKDFGGFNFSQILPDPSKPSKRSFIEDLLFNKVTLADAGFIKQYGDCLGDIAARDLICAQKFNGLTVLPPLLTDEMIAQYTSALLACTITSGWTCGAGPALQIPFAMQMAYRFNGIGVTQNVLYENQKLIANQFNSAIGKIQDSLSSTASALGKLQDVVNQNAQALNTLVKQLSSNFGAISSVLNDILSRLDPPEAEVQIDRLITGRLQSLQTYVTQQLIRAAEIRASANLAATKMSECVLGQSKRVDFCGKGYHLMSFPQSAPHGVVFLHVTYVPAQEKNFTTAPAICHDGKAHFPREGVFVSNGTHWFVTQRNFYEPQIITTDNTFVSGNCDVVIGIVNNTVYDPLQPELDSFKEELDKYFKNHTSPDVDLGDISGINASVVNIQKEIDRLNEVAKNLNESLIDLQELGKYEQGSGYIPEAPRDGQAYVRKDGEWVLLSTFLGRSLEVLFQGPGSLPETGGGSDYKDDDDKGGGGSGGGGSGGGGSGGGGSGGGGSHHHHHH

SEQ ID NO: 147 - protein, 1297 aa, Artificial Sequence
  SEQ ID NO:3 + A892P + T572I + S884C + A893C
MFVFLVLLPLVSSQCVNLTTRTQLPPAYTNSFTRGVYYPDKVFRSSVLHSTQDLFLPFFSNVTWFHAIHVSGTNGTKRFDNPVLPFNDGVYFASTEKSNIIRGWIFGTTLDSKTQSLLIVNNATNVVIKVCEFQFCNDPFLGVYYHKNNKSWMESEFRVYSSANNCTFEYVSQPFLMDLEGKQGNFKNLREFVFKNIDGYFKIYSKHTPINLVRDLPQGFSALEPLVDLPIGINITRFQTLLALHRSYLTPGDSSSGWTAGAAAYYVGYLQPRTFLLKYNENGTITDAVDCALDPLSETKCTLKSFTVEKGIYQTSNFRVQPTESIVRFPNITNLCPFGEVFNATRFASVYAWNRKRISNCVADYSVLYNSASFSTFKCYGVSPTKLNDLCFTNVYADSFVIRGDEVRQIAPGQTGKIADYNYKLPDDFTGCVIAWNSNNLDSKVGGNYNYLYRLFRKSNLKPFERDISTEIYQAGSTPCNGVEGFNCYFPLQSYGFQPTNGVGYQPYRVVVLSFELLHAPATVCGPKKSTNLVKNKCVNFNFNGLTGTGVLTESNKKFLPFQQFGRDIADITDAVRDPQTLEILDITPCSFGGVSVITPGTNTSNQVAVLYQDVNCTEVPVAIHADQLTPTWRVYSTGSNVFQTRAGCLIGAEHVNNSYECDIPIGAGICASYQTQTNSPSRAGSVASQSIIAYTMSLGAENSVAYSNNSIAIPTNFTISVTTEILPVSMTKTSVDCTMYICGDSTECSNLLLQYGSFCTQLNRALTGIAVEQDKNTQEVFAQVKQIYKTPPIKDFGGFNFSQILPDPSKPSKRSFIEDLLFNKVTLADAGFIKQYGDCLGDIAARDLICAQKFNGLTVLPPLLTDEMIAQYTSALLAGTITCGWTFGAGPCLQIPFAMQMAYRFNGIGVTQNVLYENQKLIANQFNSAIGKIQDSLSSTASALGKLQDVVNQNAQALNTLVKQLSSNFGAISSVLNDILSRLDPPEAEVQIDRLITGRLQSLQTYVTQQLIRAAEIRASANLAATKMSECVLGQSKRVDFCGKGYHLMSFPQSAPHGVVFLHVTYVPAQEKNFTTAPAICHDGKAHFPREGVFVSNGTHWFVTQRNFYEPQIITTDNTFVSGNCDVVIGIVNNTVYDPLQPELDSFKEELDKYFKNHTSPDVDLGDISGINASVVNIQKEIDRLNEVAKNLNESLIDLQELGKYEQGSGYIPEAPRDGQAYVRKDGEWVLLSTFLGRSLEVLFQGPGSLPETGGGSDYKDDDDKGGGGSGGGGSGGGGSGGGGSGGGGSHHHHHH

SEQ ID NO: 148 - protein, 1297 aa, Artificial Sequence
  SEQ ID NO:3 + A892P + N532P + G880C + F888C
MFVFLVLLPLVSSQCVNLTTRTQLPPAYTNSFTRGVYYPDKVFRSSVLHSTQDLFLPFFSNVTWFHAIHVSGTNGTKRFDNPVLPFNDGVYFASTEKSNIIRGWIFGTTLDSKTQSLLIVNNATNVVIKVCEFQFCNDPFLGVYYHKNNKSWMESEFRVYSSANNCTFEYVSQPFLMDLEGKQGNFKNLREFVFKNIDGYFKIYSKHTPINLVRDLPQGFSALEPLVDLPIGINITRFQTLLALHRSYLTPGDSSSGWTAGAAAYYVGYLQPRTFLLKYNENGTITDAVDCALDPLSETKCTLKSFTVEKGIYQTSNFRVQPTESIVRFPNITNLCPFGEVFNATRFASVYAWNRKRISNCVADYSVLYNSASFSTFKCYGVSPTKLNDLCFTNVYADSFVIRGDEVRQIAPGQTGKIADYNYKLPDDFTGCVIAWNSNNLDSKVGGNYNYLYRLFRKSNLKPFERDISTEIYQAGSTPCNGVEGFNCYFPLQSYGFQPTNGVGYQPYRVVVLSFELLHAPATVCGPKKSTPLVKNKCVNFNFNGLTGTGVLTESNKKFLPFQQFGRDIADTTDAVRDPQTLEILDITPCSFGGVSVITPGTNTSNQVAVLYQDVNCTEVPVAIHADQLTPTWRVYSTGSNVFQTRAGCLIGAEHVNNSYECDIPIGAGICASYQTQTNSPSRAGSVASQSIIAYTMSLGAENSVAYSNNSIAIPTNFTISVTTEILPVSMTKTSVDCTMYICGDSTECSNLLLQYGSFCTQLNRALTGIAVEQDKNTQEVFAQVKQIYKTPPIKDFGGFNFSQILPDPSKPSKRSFIEDLLFNKVTLADAGFIKQYGDCLGDIAARDLICAQKFNGLTVLPPLLTDEMIAQYTSALLACTITSGWTCGAGPALQIPFAMQMAYRFNGIGVTQNVLYENQKLIANQFNSAIGKIQDSLSSTASALGKLQDVVNQNAQALNTLVKQLSSNFGAISSVLNDILSRLDPPEAEVQIDRLITGRLQSLQTYVTQQLIRAAEIRASANLAATKMSECVLGQSKRVDFCGKGYHLMSFPQSAPHGVVFLHVTYVPAQEKNFTTAPAICHDGKAHFPREGVFVSNGTHWFVTQRNFYEPQIITTDNTFVSGNCDVVIGIVNNTVYDPLQPELDSFKEELDKYFKNHTSPDVDLGDISGINASVVNIQKEIDRLNEVAKNLNESLIDLQELGKYEQGSGYIPEAPRDGQAYVRKDGEWVLLSTFLGRSLEVLFQGPGSLPETGGGSDYKDDDDKGGGGSGGGGSGGGGSGGGGSGGGGSHHHHHH

SEQ ID NO: 149 - protein, 1297 aa, Artificial Sequence
  SEQ ID NO:3 + A892P + N532P + S884C + A893C
MFVFLVLLPLVSSQCVNLTTRTQLPPAYTNSFTRGVYYPDKVFRSSVLHSTQDLFLPFFSNVTWFHAIHVSGTNGTKRFDNPVLPFNDGVYFASTEKSNIIRGWIFGTTLDSKTQSLLIVNNATNVVIKVCEFQFCNDPFLGVYYHKNNKSWMESEFRVYSSANNCTFEYVSQPFLMDLEGKQGNFKNLREFVFKNIDGYFKIYSKHTPINLVRDLPQGFSALEPLVDLPIGINITRFQTLLALHRSYLTPGDSSSGWTAGAAAYYVGYLQPRTFLLKYNENGTITDAVDCALDPLSETKCTLKSFTVEKGIYQTSNFRVQPTESIVRFPNITNLCPFGEVFNATRFASVYAWNRKRISNCVADYSVLYNSASFSTFKCYGVSPTKLNDLCFTNVYADSFVIRGDEVRQIAPGQTGKIADYNYKLPDDFTGCVIAWNSNNLDSKVGGNYNYLYRLFRKSNLKPFERDISTEIYQAGSTPCNGVEGFNCYFPLQSYGFQPTNGVGYQPYRVVVLSFELLHAPATVCGPKKSTPLVKNKCVNFNFNGLTGTGVLTESNKKFLPFQQFGRDIADTTDAVRDPQTLEILDITPCSFGGVSVITPGTNTSNQVAVLYQDVNCTEVPVAIHADQLTPTWRVYSTGSNVFQTRAGCLIGAEHVNNSYECDIPIGAGICASYQTQTNSPSRAGSVASQSIIAYTMSLGAENSVAYSNNSIAIPTNFTISVTTEILPVSMTKTSVDCTMYICGDSTECSNLLLQYGSFCTQLNRALTGIAVEQDKNTQEVFAQVKQIYKTPPIKDFGGFNFSQILPDPSKPSKRSFIEDLLFNKVTLADAGFIKQYGDCLGDIAARDLICAQKFNGLTVLPPLLTDEMIAQYTSALLAGTITCGWTFGAGPCLQIPFAMQMAYRFNGIGVTQNVLYENQKLIANQFNSAIGKIQDSLSSTASALGKLQDVVNQNAQALNTLVKQLSSNFGAISSVLNDILSRLDPPEAEVQIDRLITGRLQSLQTYVTQQLIRAAEIRASANLAATKMSECVLGQSKRVDFCGKGYHLMSFPQSAPHGVVFLHVTYVPAQEKNFTTAPAICHDGKAHFPREGVFVSNGTHWFVTQRNFYEPQIITTDNTFVSGNCDVVIGIVNNTVYDPLQPELDSFKEELDKYFKNHTSPDVDLGDISGINASVVNIQKEIDRLNEVAKNLNESLIDLQELGKYEQGSGYIPEAPRDGQAYVRKDGEWVLLSTFLGRSLEVLFQGPGSLPETGGGSDYKDDDDKGGGGSGGGGSGGGGSGGGGSGGGGSHHHHHH

SEQ ID NO: 150 - protein, 1297 aa, Artificial Sequence
  SEQ ID NO:3 + D614N + T572I + N532P
MFVFLVLLPLVSSQCVNLTTRTQLPPAYTNSFTRGVYYPDKVFRSSVLHSTQDLFLPFFSNVTWFHAIHVSGTNGTKRFDNPVLPFNDGVYFASTEKSNIIRGWIFGTTLDSKTQSLLIVNNATNVVIKVCEFQFCNDPFLGVYYHKNNKSWMESEFRVYSSANNCTFEYVSQPFLMDLEGKQGNFKNLREFVFKNIDGYFKIYSKHTPINLVRDLPQGFSALEPLVDLPIGINITRFQTLLALHRSYLTPGDSSSGWTAGAAAYYVGYLQPRTFLLKYNENGTITDAVDCALDPLSETKCTLKSFTVEKGIYQTSNFRVQPTESIVRFPNITNLCPFGEVFNATRFASVYAWNRKRISNCVADYSVLYNSASFSTFKCYGVSPTKLNDLCFTNVYADSFVIRGDEVRQIAPGQTGKIADYNYKLPDDFTGCVIAWNSNNLDSKVGGNYNYLYRLFRKSNLKPFERDISTEIYQAGSTPCNGVEGFNCYFPLQSYGFQPTNGVGYQPYRVVVLSFELLHAPATVCGPKKSTPLVKNKCVNFNFNGLTGTGVLTESNKKFLPFQQFGRDIADITDAVRDPQTLEILDITPCSFGGVSVITPGTNTSNQVAVLYQNVNCTEVPVAIHADQLTPTWRVYSTGSNVFQTRAGCLIGAEHVNNSYECDIPIGAGICASYQTQTNSPSRAGSVASQSIIAYTMSLGAENSVAYSNNSIAIPTNFTISVTTEILPVSMTKTSVDCTMYICGDSTECSNLLLQYGSFCTQLNRALTGIAVEQDKNTQEVFAQVKQIYKTPPIKDFGGFNFSQILPDPSKPSKRSFIEDLLFNKVTLADAGFIKQYGDCLGDIAARDLICAQKFNGLTVLPPLLTDEMIAQYTSALLAGTITSGWTFGAGAALQIPFAMQMAYRFNGIGVTQNVLYENQKLIANQFNSAIGKIQDSLSSTASALGKLQDVVNQNAQALNTLVKQLSSNFGAISSVLNDILSRLDPPEAEVQIDRLITGRLQSLQTYVTQQLIRAAEIRASANLAATKMSECVLGQSKRVDFCGKGYHLMSFPQSAPHGVVFLHVTYVPAQEKNFTTAPAICHDGKAHFPREGVFVSNGTHWFVTQRNFYEPQIITTDNTFVSGNCDVVIGIVNNTVYDPLQPELDSFKEELDKYFKNHTSPDVDLGDISGINASVVNIQKEIDRLNEVAKNLNESLIDLQELGKYEQGSGYIPEAPRDGQAYVRKDGEWVLLSTFLGRSLEVLFQGPGSLPETGGGSDYKDDDDKGGGGSGGGGSGGGGSGGGGSGGGGSHHHHHH

SEQ ID NO: 151 - protein, 1297 aa, Artificial Sequence
  SEQ ID NO:3 + D614N + T572I + G880C + F888C
MFVFLVLLPLVSSQCVNLTTRTQLPPAYTNSFTRGVYYPDKVFRSSVLHSTQDLFLPFFSNVTWFHAIHVSGTNGTKRFDNPVLPFNDGVYFASTEKSNIIRGWIFGTTLDSKTQSLLIVNNATNVVIKVCEFQFCNDPFLGVYYHKNNKSWMESEFRVYSSANNCTFEYVSQPFLMDLEGKQGNFKNLREFVFKNIDGYFKIYSKHTPINLVRDLPQGFSALEPLVDLPIGINITRFQTLLALHRSYLTPGDSSSGWTAGAAAYYVGYLQPRTFLLKYNENGTITDAVDCALDPLSETKCTLKSFTVEKGIYQTSNFRVQPTESIVRFPNITNLCPFGEVFNATRFASVYAWNRKRISNCVADYSVLYNSASFSTFKCYGVSPTKLNDLCFTNVYADSFVIRGDEVRQIAPGQTGKIADYNYKLPDDFTGCVIAWNSNNLDSKVGGNYNYLYRLFRKSNLKPFERDISTEIYQAGSTPCNGVEGFNCYFPLQSYGFQPTNGVGYQPYRVVVLSFELLHAPATVCGPKKSTNLVKNKCVNFNFNGLTGTGVLTESNKKFLPFQQFGRDIADITDAVRDPQTLEILDITPCSFGGVSVITPGTNTSNQVAVLYQNVNCTEVPVAIHADQLTPTWRVYSTGSNVFQTRAGCLIGAEHVNNSYECDIPIGAGICASYQTQTNSPSRAGSVASQSIIAYTMSLGAENSVAYSNNSIAIPTNFTISVTTEILPVSMTKTSVDCTMYICGDSTECSNLLLQYGSFCTQLNRALTGIAVEQDKNTQEVFAQVKQIYKTPPIKDFGGFNFSQILPDPSKPSKRSFIEDLLFNKVTLADAGFIKQYGDCLGDIAARDLICAQKFNGLTVLPPLLTDEMIAQYTSALLACTITSGWTCGAGAALQIPFAMQMAYRFNGIGVTQNVLYENQKLIANQFNSAIGKIQDSLSSTASALGKLQDVVNQNAQALNTLVKQLSSNFGAISSVLNDILSRLDPPEAEVQIDRLITGRLQSLQTYVTQQLIRAAEIRASANLAATKMSECVLGQSKRVDFCGKGYHLMSFPQSAPHGVVFLHVTYVPAQEKNFTTAPAICHDGKAHFPREGVFVSNGTHWFVTQRNFYEPQIITTDNTFVSGNCDVVIGIVNNTVYDPLQPELDSFKEELDKYFKNHTSPDVDLGDISGINASVVNIQKEIDRLNEVAKNLNESLIDLQELGKYEQGSGYIPEAPRDGQAYVRKDGEWVLLSTFLGRSLEVLFQGPGSLPETGGGSDYKDDDDKGGGGSGGGGSGGGGSGGGGSGGGGSHHHHHH

SEQ ID NO: 152 - protein, 1297 aa, Artificial Sequence
  SEQ ID NO:3 + D614N + T572I + S884C + A893C
MFVFLVLLPLVSSQCVNLTTRTQLPPAYTNSFTRGVYYPDKVFRSSVLHSTQDLFLPFFSNVTWFHAIHVSGTNGTKRFDNPVLPFNDGVYFASTEKSNIIRGWIFGTTLDSKTQSLLIVNNATNVVIKVCEFQFCNDPFLGVYYHKNNKSWMESEFRVYSSANNCTFEYVSQPFLMDLEGKQGNFKNLREFVFKNIDGYFKIYSKHTPINLVRDLPQGFSALEPLVDLPIGINITRFQTLLALHRSYLTPGDSSSGWTAGAAAYYVGYLQPRTFLLKYNENGTITDAVDCALDPLSETKCTLKSFTVEKGIYQTSNFRVQPTESIVRFPNITNLCPFGEVFNATRFASVYAWNRKRISNCVADYSVLYNSASFSTFKCYGVSPTKLNDLCFTNVYADSFVIRGDEVRQIAPGQTGKIADYNYKLPDDFTGCVIAWNSNNLDSKVGGNYNYLYRLFRKSNLKPFERDISTEIYQAGSTPCNGVEGFNCYFPLQSYGFQPTNGVGYQPYRVVVLSFELLHAPATVCGPKKSTNLVKNKCVNFNFNGLTGTGVLTESNKKFLPFQQFGRDIADITDAVRDPQTLEILDITPCSFGGVSVITPGTNTSNQVAVLYQNVNCTEVPVAIHADQLTPTWRVYSTGSNVFQTRAGCLIGAEHVNNSYECDIPIGAGICASYQTQTNSPSRAGSVASQSIIAYTMSLGAENSVAYSNNSIAIPTNFTISVTTEILPVSMTKTSVDCTMYICGDSTECSNLLLQYGSFCTQLNRALTGIAVEQDKNTQEVFAQVKQIYKTPPIKDFGGFNFSQILPDPSKPSKRSFIEDLLFNKVTLADAGFIKQYGDCLGDIAARDLICAQKFNGLTVLPPLLTDEMIAQYTSALLAGTITCGWTFGAGACLQIPFAMQMAYRFNGIGVTQNVLYENQKLIANQFNSAIGKIQDSLSSTASALGKLQDVVNQNAQALNTLVKQLSSNFGAISSVLNDILSRLDPPEAEVQIDRLITGRLQSLQTYVTQQLIRAAEIRASANLAATKMSECVLGQSKRVDFCGKGYHLMSFPQSAPHGVVFLHVTYVPAQEKNFTTAPAICHDGKAHFPREGVFVSNGTHWFVTQRNFYEPQIITTDNTFVSGNCDVVIGIVNNTVYDPLQPELDSFKEELDKYFKNHTSPDVDLGDISGINASVVNIQKEIDRLNEVAKNLNESLIDLQELGKYEQGSGYIPEAPRDGQAYVRKDGEWVLLSTFLGRSLEVLFQGPGSLPETGGGSDYKDDDDKGGGGSGGGGSGGGGSGGGGSGGGGSHHHHHH

SEQ ID NO: 153 - protein, 1297 aa, Artificial Sequence
  SEQ ID NO:3 + D614N + N532P + G880C + F888C
MFVFLVLLPLVSSQCVNLTTRTQLPPAYTNSFTRGVYYPDKVFRSSVLHSTQDLFLPFFSNVTWFHAIHVSGTNGTKRFDNPVLPFNDGVYFASTEKSNIIRGWIFGTTLDSKTQSLLIVNNATNVVIKVCEFQFCNDPFLGVYYHKNNKSWMESEFRVYSSANNCTFEYVSQPFLMDLEGKQGNFKNLREFVFKNIDGYFKIYSKHTPINLVRDLPQGFSALEPLVDLPIGINITRFQTLLALHRSYLTPGDSSSGWTAGAAAYYVGYLQPRTFLLKYNENGTITDAVDCALDPLSETKCTLKSFTVEKGIYQTSNFRVQPTESIVRFPNITNLCPFGEVFNATRFASVYAWNRKRISNCVADYSVLYNSASFSTFKCYGVSPTKLNDLCFTNVYADSFVIRGDEVRQIAPGQTGKIADYNYKLPDDFTGCVIAWNSNNLDSKVGGNYNYLYRLFRKSNLKPFERDISTEIYQAGSTPCNGVEGFNCYFPLQSYGFQPTNGVGYQPYRVVVLSFELLHAPATVCGPKKSTPLVKNKCVNFNFNGLTGTGVLTESNKKFLPFQQFGRDIADTTDAVRDPQTLEILDITPCSFGGVSVITPGTNTSNQVAVLYQNVNCTEVPVAIHADQLTPTWRVYSTGSNVFQTRAGCLIGAEHVNNSYECDIPIGAGICASYQTQTNSPSRAGSVASQSIIAYTMSLGAENSVAYSNNSIAIPTNFTISVTTEILPVSMTKTSVDCTMYICGDSTECSNLLLQYGSFCTQLNRALTGIAVEQDKNTQEVFAQVKQIYKTPPIKDFGGFNFSQILPDPSKPSKRSFIEDLLFNKVTLADAGFIKQYGDCLGDIAARDLICAQKFNGLTVLPPLLTDEMIAQYTSALLACTITSGWTCGAGAALQIPFAMQMAYRFNGIGVTQNVLYENQKLIANQFNSAIGKIQDSLSSTASALGKLQDVVNQNAQALNTLVKQLSSNFGAISSVLNDILSRLDPPEAEVQIDRLITGRLQSLQTYVTQQLIRAAEIRASANLAATKMSECVLGQSKRVDFCGKGYHLMSFPQSAPHGVVFLHVTYVPAQEKNFTTAPAICHDGKAHFPREGVFVSNGTHWFVTQRNFYEPQIITTDNTFVSGNCDVVIGIVNNTVYDPLQPELDSFKEELDKYFKNHTSPDVDLGDISGINASVVNIQKEIDRLNEVAKNLNESLIDLQELGKYEQGSGYIPEAPRDGQAYVRKDGEWVLLSTFLGRSLEVLFQGPGSLPETGGGSDYKDDDDKGGGGSGGGGSGGGGSGGGGSGGGGSHHHHHH

SEQ ID NO: 154 - protein, 1297 aa, Artificial Sequence
  SEQ ID NO:3 + D614N + N532P + S884C + A893C
MFVFLVLLPLVSSQCVNLTTRTQLPPAYTNSFTRGVYYPDKVFRSSVLHSTQDLFLPFFSNVTWFHAIHVSGTNGTKRFDNPVLPFNDGVYFASTEKSNIIRGWIFGTTLDSKTQSLLIVNNATNVVIKVCEFQFCNDPFLGVYYHKNNKSWMESEFRVYSSANNCTFEYVSQPFLMDLEGKQGNFKNLREFVFKNIDGYFKIYSKHTPINLVRDLPQGFSALEPLVDLPIGINITRFQTLLALHRSYLTPGDSSSGWTAGAAAYYVGYLQPRTFLLKYNENGTITDAVDCALDPLSETKCTLKSFTVEKGIYQTSNFRVQPTESIVRFPNITNLCPFGEVFNATRFASVYAWNRKRISNCVADYSVLYNSASFSTFKCYGVSPTKLNDLCFTNVYADSFVIRGDEVRQIAPGQTGKIADYNYKLPDDFTGCVIAWNSNNLDSKVGGNYNYLYRLFRKSNLKPFERDISTEIYQAGSTPCNGVEGFNCYFPLQSYGFQPTNGVGYQPYRVVVLSFELLHAPATVCGPKKSTPLVKNKCVNFNFNGLTGTGVLTESNKKFLPFQQFGRDIADTTDAVRDPQTLEILDITPCSFGGVSVITPGTNTSNQVAVLYQNVNCTEVPVAIHADQLTPTWRVYSTGSNVFQTRAGCLIGAEHVNNSYECDIPIGAGICASYQTQTNSPSRAGSVASQSIIAYTMSLGAENSVAYSNNSIAIPTNFTISVTTEILPVSMTKTSVDCTMYICGDSTECSNLLLQYGSFCTQLNRALTGIAVEQDKNTQEVFAQVKQIYKTPPIKDFGGFNFSQILPDPSKPSKRSFIEDLLFNKVTLADAGFIKQYGDCLGDIAARDLICAQKFNGLTVLPPLLTDEMIAQYTSALLAGTITCGWTFGAGACLQIPFAMQMAYRFNGIGVTQNVLYENQKLIANQFNSAIGKIQDSLSSTASALGKLQDVVNQNAQALNTLVKQLSSNFGAISSVLNDILSRLDPPEAEVQIDRLITGRLQSLQTYVTQQLIRAAEIRASANLAATKMSECVLGQSKRVDFCGKGYHLMSFPQSAPHGVVFLHVTYVPAQEKNFTTAPAICHDGKAHFPREGVFVSNGTHWFVTQRNFYEPQIITTDNTFVSGNCDVVIGIVNNTVYDPLQPELDSFKEELDKYFKNHTSPDVDLGDISGINASVVNIQKEIDRLNEVAKNLNESLIDLQELGKYEQGSGYIPEAPRDGQAYVRKDGEWVLLSTFLGRSLEVLFQGPGSLPETGGGSDYKDDDDKGGGGSGGGGSGGGGSGGGGSGGGGSHHHHHH

SEQ ID NO: 155 - protein, 1297 aa, Artificial Sequence
  SEQ ID NO:3 + T572I + N532P + G880C + F888C
MFVFLVLLPLVSSQCVNLTTRTQLPPAYTNSFTRGVYYPDKVFRSSVLHSTQDLFLPFFSNVTWFHAIHVSGTNGTKRFDNPVLPFNDGVYFASTEKSNIIRGWIFGTTLDSKTQSLLIVNNATNVVIKVCEFQFCNDPFLGVYYHKNNKSWMESEFRVYSSANNCTFEYVSQPFLMDLEGKQGNFKNLREFVFKNIDGYFKIYSKHTPINLVRDLPQGFSALEPLVDLPIGINITRFQTLLALHRSYLTPGDSSSGWTAGAAAYYVGYLQPRTFLLKYNENGTITDAVDCALDPLSETKCTLKSFTVEKGIYQTSNFRVQPTESIVRFPNITNLCPFGEVFNATRFASVYAWNRKRISNCVADYSVLYNSASFSTFKCYGVSPTKLNDLCFTNVYADSFVIRGDEVRQIAPGQTGKIADYNYKLPDDFTGCVIAWNSNNLDSKVGGNYNYLYRLFRKSNLKPFERDISTEIYQAGSTPCNGVEGFNCYFPLQSYGFQPTNGVGYQPYRVVVLSFELLHAPATVCGPKKSTPLVKNKCVNFNFNGLTGTGVLTESNKKFLPFQQFGRDIADITDAVRDPQTLEILDITPCSFGGVSVITPGTNTSNQVAVLYQDVNCTEVPVAIHADQLTPTWRVYSTGSNVFQTRAGCLIGAEHVNNSYECDIPIGAGICASYQTQTNSPSRAGSVASQSIIAYTMSLGAENSVAYSNNSIAIPTNFTISVTTEILPVSMTKTSVDCTMYICGDSTECSNLLLQYGSFCTQLNRALTGIAVEQDKNTQEVFAQVKQIYKTPPIKDFGGFNFSQILPDPSKPSKRSFIEDLLFNKVTLADAGFIKQYGDCLGDIAARDLICAQKFNGLTVLPPLLTDEMIAQYTSALLACTITSGWTCGAGAALQIPFAMQMAYRFNGIGVTQNVLYENQKLIANQFNSAIGKIQDSLSSTASALGKLQDVVNQNAQALNTLVKQLSSNFGAISSVLNDILSRLDPPEAEVQIDRLITGRLQSLQTYVTQQLIRAAEIRASANLAATKMSECVLGQSKRVDFCGKGYHLMSFPQSAPHGVVFLHVTYVPAQEKNFTTAPAICHDGKAHFPREGVFVSNGTHWFVTQRNFYEPQIITTDNTFVSGNCDVVIGIVNNTVYDPLQPELDSFKEELDKYFKNHTSPDVDLGDISGINASVVNIQKEIDRLNEVAKNLNESLIDLQELGKYEQGSGYIPEAPRDGQAYVRKDGEWVLLSTFLGRSLEVLFQGPGSLPETGGGSDYKDDDDKGGGGSGGGGSGGGGSGGGGSGGGGSHHHHHH

SEQ ID NO: 156 - protein, 1297 aa, Artificial Sequence
  SEQ ID NO:3 + T572I + N532P + S884C + A893C
MFVFLVLLPLVSSQCVNLTTRTQLPPAYTNSFTRGVYYPDKVFRSSVLHSTQDLFLPFFSNVTWFHAIHVSGTNGTKRFDNPVLPFNDGVYFASTEKSNIIRGWIFGTTLDSKTQSLLIVNNATNVVIKVCEFQFCNDPFLGVYYHKNNKSWMESEFRVYSSANNCTFEYVSQPFLMDLEGKQGNFKNLREFVFKNIDGYFKIYSKHTPINLVRDLPQGFSALEPLVDLPIGINITRFQTLLALHRSYLTPGDSSSGWTAGAAAYYVGYLQPRTFLLKYNENGTITDAVDCALDPLSETKCTLKSFTVEKGIYQTSNFRVQPTESIVRFPNITNLCPFGEVFNATRFASVYAWNRKRISNCVADYSVLYNSASFSTFKCYGVSPTKLNDLCFTNVYADSFVIRGDEVRQIAPGQTGKIADYNYKLPDDFTGCVIAWNSNNLDSKVGGNYNYLYRLFRKSNLKPFERDISTEIYQAGSTPCNGVEGFNCYFPLQSYGFQPTNGVGYQPYRVVVLSFELLHAPATVCGPKKSTPLVKNKCVNFNFNGLTGTGVLTESNKKFLPFQQFGRDIADITDAVRDPQTLEILDITPCSFGGVSVITPGTNTSNQVAVLYQDVNCTEVPVAIHADQLTPTWRVYSTGSNVFQTRAGCLIGAEHVNNSYECDIPIGAGICASYQTQTNSPSRAGSVASQSIIAYTMSLGAENSVAYSNNSIAIPTNFTISVTTEILPVSMTKTSVDCTMYICGDSTECSNLLLQYGSFCTQLNRALTGIAVEQDKNTQEVFAQVKQIYKTPPIKDFGGFNFSQILPDPSKPSKRSFIEDLLFNKVTLADAGFIKQYGDCLGDIAARDLICAQKFNGLTVLPPLLTDEMIAQYTSALLAGTITCGWTFGAGACLQIPFAMQMAYRFNGIGVTQNVLYENQKLIANQFNSAIGKIQDSLSSTASALGKLQDVVNQNAQALNTLVKQLSSNFGAISSVLNDILSRLDPPEAEVQIDRLITGRLQSLQTYVTQQLIRAAEIRASANLAATKMSECVLGQSKRVDFCGKGYHLMSFPQSAPHGVVFLHVTYVPAQEKNFTTAPAICHDGKAHFPREGVFVSNGTHWFVTQRNFYEPQIITTDNTFVSGNCDVVIGIVNNTVYDPLQPELDSFKEELDKYFKNHTSPDVDLGDISGINASVVNIQKEIDRLNEVAKNLNESLIDLQELGKYEQGSGYIPEAPRDGQAYVRKDGEWVLLSTFLGRSLEVLFQGPGSLPETGGGSDYKDDDDKGGGGSGGGGSGGGGSGGGGSGGGGSHHHHHH

SEQ ID NO: 157 - protein, 1297 aa, Artificial Sequence
  SEQ ID NO:3 + A942P + A892P + D614N + T572I
MFVFLVLLPLVSSQCVNLTTRTQLPPAYTNSFTRGVYYPDKVFRSSVLHSTQDLFLPFFSNVTWFHAIHVSGTNGTKRFDNPVLPFNDGVYFASTEKSNIIRGWIFGTTLDSKTQSLLIVNNATNVVIKVCEFQFCNDPFLGVYYHKNNKSWMESEFRVYSSANNCTFEYVSQPFLMDLEGKQGNFKNLREFVFKNIDGYFKIYSKHTPINLVRDLPQGFSALEPLVDLPIGINITRFQTLLALHRSYLTPGDSSSGWTAGAAAYYVGYLQPRTFLLKYNENGTITDAVDCALDPLSETKCTLKSFTVEKGIYQTSNFRVQPTESIVRFPNITNLCPFGEVFNATRFASVYAWNRKRISNCVADYSVLYNSASFSTFKCYGVSPTKLNDLCFTNVYADSFVIRGDEVRQIAPGQTGKIADYNYKLPDDFTGCVIAWNSNNLDSKVGGNYNYLYRLFRKSNLKPFERDISTEIYQAGSTPCNGVEGFNCYFPLQSYGFQPTNGVGYQPYRVVVLSFELLHAPATVCGPKKSTNLVKNKCVNFNFNGLTGTGVLTESNKKFLPFQQFGRDIADITDAVRDPQTLEILDITPCSFGGVSVITPGTNTSNQVAVLYQNVNCTEVPVAIHADQLTPTWRVYSTGSNVFQTRAGCLIGAEHVNNSYECDIPIGAGICASYQTQTNSPSRAGSVASQSIIAYTMSLGAENSVAYSNNSIAIPTNFTISVTTEILPVSMTKTSVDCTMYICGDSTECSNLLLQYGSFCTQLNRALTGIAVEQDKNTQEVFAQVKQIYKTPPIKDFGGFNFSQILPDPSKPSKRSFIEDLLFNKVTLADAGFIKQYGDCLGDIAARDLICAQKFNGLTVLPPLLTDEMIAQYTSALLAGTITSGWTFGAGPALQIPFAMQMAYRFNGIGVTQNVLYENQKLIANQFNSAIGKIQDSLSSTPSALGKLQDVVNQNAQALNTLVKQLSSNFGAISSVLNDILSRLDPPEAEVQIDRLITGRLQSLQTYVTQQLIRAAEIRASANLAATKMSECVLGQSKRVDFCGKGYHLMSFPQSAPHGVVFLHVTYVPAQEKNFTTAPAICHDGKAHFPREGVFVSNGTHWFVTQRNFYEPQIITTDNTFVSGNCDVVIGIVNNTVYDPLQPELDSFKEELDKYFKNHTSPDVDLGDISGINASVVNIQKEIDRLNEVAKNLNESLIDLQELGKYEQGSGYIPEAPRDGQAYVRKDGEWVLLSTFLGRSLEVLFQGPGSLPETGGGSDYKDDDDKGGGGSGGGGSGGGGSGGGGSGGGGSHHHHHH

SEQ ID NO: 158 - protein, 1297 aa, Artificial Sequence
  SEQ ID NO:3 + A942P + A892P + D614N + N532P
MFVFLVLLPLVSSQCVNLTTRTQLPPAYTNSFTRGVYYPDKVFRSSVLHSTQDLFLPFFSNVTWFHAIHVSGTNGTKRFDNPVLPFNDGVYFASTEKSNIIRGWIFGTTLDSKTQSLLIVNNATNVVIKVCEFQFCNDPFLGVYYHKNNKSWMESEFRVYSSANNCTFEYVSQPFLMDLEGKQGNFKNLREFVFKNIDGYFKIYSKHTPINLVRDLPQGFSALEPLVDLPIGINITRFQTLLALHRSYLTPGDSSSGWTAGAAAYYVGYLQPRTFLLKYNENGTITDAVDCALDPLSETKCTLKSFTVEKGIYQTSNFRVQPTESIVRFPNITNLCPFGEVFNATRFASVYAWNRKRISNCVADYSVLYNSASFSTFKCYGVSPTKLNDLCFTNVYADSFVIRGDEVRQIAPGQTGKIADYNYKLPDDFTGCVIAWNSNNLDSKVGGNYNYLYRLFRKSNLKPFERDISTEIYQAGSTPCNGVEGFNCYFPLQSYGFQPTNGVGYQPYRVVVLSFELLHAPATVCGPKKSTPLVKNKCVNFNFNGLTGTGVLTESNKKFLPFQQFGRDIADTTDAVRDPQTLEILDITPCSFGGVSVITPGTNTSNQVAVLYQNVNCTEVPVAIHADQLTPTWRVYSTGSNVFQTRAGCLIGAEHVNNSYECDIPIGAGICASYQTQTNSPSRAGSVASQSIIAYTMSLGAENSVAYSNNSIAIPTNFTISVTTEILPVSMTKTSVDCTMYICGDSTECSNLLLQYGSFCTQLNRALTGIAVEQDKNTQEVFAQVKQIYKTPPIKDFGGFNFSQILPDPSKPSKRSFIEDLLFNKVTLADAGFIKQYGDCLGDIAARDLICAQKFNGLTVLPPLLTDEMIAQYTSALLAGTITSGWTFGAGPALQIPFAMQMAYRFNGIGVTQNVLYENQKLIANQFNSAIGKIQDSLSSTPSALGKLQDVVNQNAQALNTLVKQLSSNFGAISSVLNDILSRLDPPEAEVQIDRLITGRLQSLQTYVTQQLIRAAEIRASANLAATKMSECVLGQSKRVDFCGKGYHLMSFPQSAPHGVVFLHVTYVPAQEKNFTTAPAICHDGKAHFPREGVFVSNGTHWFVTQRNFYEPQIITTDNTFVSGNCDVVIGIVNNTVYDPLQPELDSFKEELDKYFKNHTSPDVDLGDISGINASVVNIQKEIDRLNEVAKNLNESLIDLQELGKYEQGSGYIPEAPRDGQAYVRKDGEWVLLSTFLGRSLEVLFQGPGSLPETGGGSDYKDDDDKGGGGSGGGGSGGGGSGGGGSGGGGSHHHHHH

SEQ ID NO: 159 - protein, 1297 aa, Artificial Sequence
  SEQ ID NO:3 + A942P + A892P + D614N + G880C + F888C
MFVFLVLLPLVSSQCVNLTTRTQLPPAYTNSFTRGVYYPDKVFRSSVLHSTQDLFLPFFSNVTWFHAIHVSGTNGTKRFDNPVLPFNDGVYFASTEKSNIIRGWIFGTTLDSKTQSLLIVNNATNVVIKVCEFQFCNDPFLGVYYHKNNKSWMESEFRVYSSANNCTFEYVSQPFLMDLEGKQGNFKNLREFVFKNIDGYFKIYSKHTPINLVRDLPQGFSALEPLVDLPIGINITRFQTLLALHRSYLTPGDSSSGWTAGAAAYYVGYLQPRTFLLKYNENGTITDAVDCALDPLSETKCTLKSFTVEKGIYQTSNFRVQPTESIVRFPNITNLCPFGEVFNATRFASVYAWNRKRISNCVADYSVLYNSASFSTFKCYGVSPTKLNDLCFTNVYADSFVIRGDEVRQIAPGQTGKIADYNYKLPDDFTGCVIAWNSNNLDSKVGGNYNYLYRLFRKSNLKPFERDISTEIYQAGSTPCNGVEGFNCYFPLQSYGFQPTNGVGYQPYRVVVLSFELLHAPATVCGPKKSTNLVKNKCVNFNFNGLTGTGVLTESNKKFLPFQQFGRDIADTTDAVRDPQTLEILDITPCSFGGVSVITPGTNTSNQVAVLYQNVNCTEVPVAIHADQLTPTWRVYSTGSNVFQTRAGCLIGAEHVNNSYECDIPIGAGICASYQTQTNSPSRAGSVASQSIIAYTMSLGAENSVAYSNNSIAIPTNFTISVTTEILPVSMTKTSVDCTMYICGDSTECSNLLLQYGSFCTQLNRALTGIAVEQDKNTQEVFAQVKQIYKTPPIKDFGGFNFSQILPDPSKPSKRSFIEDLLFNKVTLADAGFIKQYGDCLGDIAARDLICAQKFNGLTVLPPLLTDEMIAQYTSALLACTITSGWTCGAGPALQIPFAMQMAYRFNGIGVTQNVLYENQKLIANQFNSAIGKIQDSLSSTPSALGKLQDVVNQNAQALNTLVKQLSSNFGAISSVLNDILSRLDPPEAEVQIDRLITGRLQSLQTYVTQQLIRAAEIRASANLAATKMSECVLGQSKRVDFCGKGYHLMSFPQSAPHGVVFLHVTYVPAQEKNFTTAPAICHDGKAHFPREGVFVSNGTHWFVTQRNFYEPQIITTDNTFVSGNCDVVIGIVNNTVYDPLQPELDSFKEELDKYFKNHTSPDVDLGDISGINASVVNIQKEIDRLNEVAKNLNESLIDLQELGKYEQGSGYIPEAPRDGQAYVRKDGEWVLLSTFLGRSLEVLFQGPGSLPETGGGSDYKDDDDKGGGGSGGGGSGGGGSGGGGSGGGGSHHHHHH

SEQ ID NO: 160 - protein, 1297 aa, Artificial Sequence
  SEQ ID NO:3 + A942P + A892P + D614N + S884C + A893C
MFVFLVLLPLVSSQCVNLTTRTQLPPAYTNSFTRGVYYPDKVFRSSVLHSTQDLFLPFFSNVTWFHAIHVSGTNGTKRFDNPVLPFNDGVYFASTEKSNIIRGWIFGTTLDSKTQSLLIVNNATNVVIKVCEFQFCNDPFLGVYYHKNNKSWMESEFRVYSSANNCTFEYVSQPFLMDLEGKQGNFKNLREFVFKNIDGYFKIYSKHTPINLVRDLPQGFSALEPLVDLPIGINITRFQTLLALHRSYLTPGDSSSGWTAGAAAYYVGYLQPRTFLLKYNENGTITDAVDCALDPLSETKCTLKSFTVEKGIYQTSNFRVQPTESIVRFPNITNLCPFGEVFNATRFASVYAWNRKRISNCVADYSVLYNSASFSTFKCYGVSPTKLNDLCFTNVYADSFVIRGDEVRQIAPGQTGKIADYNYKLPDDFTGCVIAWNSNNLDSKVGGNYNYLYRLFRKSNLKPFERDISTEIYQAGSTPCNGVEGFNCYFPLQSYGFQPTNGVGYQPYRVVVLSFELLHAPATVCGPKKSTNLVKNKCVNFNFNGLTGTGVLTESNKKFLPFQQFGRDIADTTDAVRDPQTLEILDITPCSFGGVSVITPGTNTSNQVAVLYQNVNCTEVPVAIHADQLTPTWRVYSTGSNVFQTRAGCLIGAEHVNNSYECDIPIGAGICASYQTQTNSPSRAGSVASQSIIAYTMSLGAENSVAYSNNSIAIPTNFTISVTTEILPVSMTKTSVDCTMYICGDSTECSNLLLQYGSFCTQLNRALTGIAVEQDKNTQEVFAQVKQIYKTPPIKDFGGFNFSQILPDPSKPSKRSFIEDLLFNKVTLADAGFIKQYGDCLGDIAARDLICAQKFNGLTVLPPLLTDEMIAQYTSALLAGTITCGWTFGAGPCLQIPFAMQMAYRFNGIGVTQNVLYENQKLIANQFNSAIGKIQDSLSSTPSALGKLQDVVNQNAQALNTLVKQLSSNFGAISSVLNDILSRLDPPEAEVQIDRLITGRLQSLQTYVTQQLIRAAEIRASANLAATKMSECVLGQSKRVDFCGKGYHLMSFPQSAPHGVVFLHVTYVPAQEKNFTTAPAICHDGKAHFPREGVFVSNGTHWFVTQRNFYEPQIITTDNTFVSGNCDVVIGIVNNTVYDPLQPELDSFKEELDKYFKNHTSPDVDLGDISGINASVVNIQKEIDRLNEVAKNLNESLIDLQELGKYEQGSGYIPEAPRDGQAYVRKDGEWVLLSTFLGRSLEVLFQGPGSLPETGGGSDYKDDDDKGGGGSGGGGSGGGGSGGGGSGGGGSHHHHHH

SEQ ID NO: 161 - protein, 1297 aa, Artificial Sequence
  SEQ ID NO:3 + A942P + A892P + T572I + N532P
MFVFLVLLPLVSSQCVNLTTRTQLPPAYTNSFTRGVYYPDKVFRSSVLHSTQDLFLPFFSNVTWFHAIHVSGTNGTKRFDNPVLPFNDGVYFASTEKSNIIRGWIFGTTLDSKTQSLLIVNNATNVVIKVCEFQFCNDPFLGVYYHKNNKSWMESEFRVYSSANNCTFEYVSQPFLMDLEGKQGNFKNLREFVFKNIDGYFKIYSKHTPINLVRDLPQGFSALEPLVDLPIGINITRFQTLLALHRSYLTPGDSSSGWTAGAAAYYVGYLQPRTFLLKYNENGTITDAVDCALDPLSETKCTLKSFTVEKGIYQTSNFRVQPTESIVRFPNITNLCPFGEVFNATRFASVYAWNRKRISNCVADYSVLYNSASFSTFKCYGVSPTKLNDLCFTNVYADSFVIRGDEVRQIAPGQTGKIADYNYKLPDDFTGCVIAWNSNNLDSKVGGNYNYLYRLFRKSNLKPFERDISTEIYQAGSTPCNGVEGFNCYFPLQSYGFQPTNGVGYQPYRVVVLSFELLHAPATVCGPKKSTPLVKNKCVNFNFNGLTGTGVLTESNKKFLPFQQFGRDIADITDAVRDPQTLEILDITPCSFGGVSVITPGTNTSNQVAVLYQDVNCTEVPVAIHADQLTPTWRVYSTGSNVFQTRAGCLIGAEHVNNSYECDIPIGAGICASYQTQTNSPSRAGSVASQSIIAYTMSLGAENSVAYSNNSIAIPTNFTISVTTEILPVSMTKTSVDCTMYICGDSTECSNLLLQYGSFCTQLNRALTGIAVEQDKNTQEVFAQVKQIYKTPPIKDFGGFNFSQILPDPSKPSKRSFIEDLLFNKVTLADAGFIKQYGDCLGDIAARDLICAQKFNGLTVLPPLLTDEMIAQYTSALLAGTITSGWTFGAGPALQIPFAMQMAYRFNGIGVTQNVLYENQKLIANQFNSAIGKIQDSLSSTPSALGKLQDVVNQNAQALNTLVKQLSSNFGAISSVLNDILSRLDPPEAEVQIDRLITGRLQSLQTYVTQQLIRAAEIRASANLAATKMSECVLGQSKRVDFCGKGYHLMSFPQSAPHGVVFLHVTYVPAQEKNFTTAPAICHDGKAHFPREGVFVSNGTHWFVTQRNFYEPQIITTDNTFVSGNCDVVIGIVNNTVYDPLQPELDSFKEELDKYFKNHTSPDVDLGDISGINASVVNIQKEIDRLNEVAKNLNESLIDLQELGKYEQGSGYIPEAPRDGQAYVRKDGEWVLLSTFLGRSLEVLFQGPGSLPETGGGSDYKDDDDKGGGGSGGGGSGGGGSGGGGSGGGGSHHHHHH

SEQ ID NO: 162 - protein, 1297 aa, Artificial Sequence
  SEQ ID NO:3 + A942P + A892P + T572I + G880C + F888C
MFVFLVLLPLVSSQCVNLTTRTQLPPAYTNSFTRGVYYPDKVFRSSVLHSTQDLFLPFFSNVTWFHAIHVSGTNGTKRFDNPVLPFNDGVYFASTEKSNIIRGWIFGTTLDSKTQSLLIVNNATNVVIKVCEFQFCNDPFLGVYYHKNNKSWMESEFRVYSSANNCTFEYVSQPFLMDLEGKQGNFKNLREFVFKNIDGYFKIYSKHTPINLVRDLPQGFSALEPLVDLPIGINITRFQTLLALHRSYLTPGDSSSGWTAGAAAYYVGYLQPRTFLLKYNENGTITDAVDCALDPLSETKCTLKSFTVEKGIYQTSNFRVQPTESIVRFPNITNLCPFGEVFNATRFASVYAWNRKRISNCVADYSVLYNSASFSTFKCYGVSPTKLNDLCFTNVYADSFVIRGDEVRQIAPGQTGKIADYNYKLPDDFTGCVIAWNSNNLDSKVGGNYNYLYRLFRKSNLKPFERDISTEIYQAGSTPCNGVEGFNCYFPLQSYGFQPTNGVGYQPYRVVVLSFELLHAPATVCGPKKSTNLVKNKCVNFNFNGLTGTGVLTESNKKFLPFQQFGRDIADITDAVRDPQTLEILDITPCSFGGVSVITPGTNTSNQVAVLYQDVNCTEVPVAIHADQLTPTWRVYSTGSNVFQTRAGCLIGAEHVNNSYECDIPIGAGICASYQTQTNSPSRAGSVASQSIIAYTMSLGAENSVAYSNNSIAIPTNFTISVTTEILPVSMTKTSVDCTMYICGDSTECSNLLLQYGSFCTQLNRALTGIAVEQDKNTQEVFAQVKQIYKTPPIKDFGGFNFSQILPDPSKPSKRSFIEDLLFNKVTLADAGFIKQYGDCLGDIAARDLICAQKFNGLTVLPPLLTDEMIAQYTSALLACTITSGWTCGAGPALQIPFAMQMAYRFNGIGVTQNVLYENQKLIANQFNSAIGKIQDSLSSTPSALGKLQDVVNQNAQALNTLVKQLSSNFGAISSVLNDILSRLDPPEAEVQIDRLITGRLQSLQTYVTQQLIRAAEIRASANLAATKMSECVLGQSKRVDFCGKGYHLMSFPQSAPHGVVFLHVTYVPAQEKNFTTAPAICHDGKAHFPREGVFVSNGTHWFVTQRNFYEPQIITTDNTFVSGNCDVVIGIVNNTVYDPLQPELDSFKEELDKYFKNHTSPDVDLGDISGINASVVNIQKEIDRLNEVAKNLNESLIDLQELGKYEQGSGYIPEAPRDGQAYVRKDGEWVLLSTFLGRSLEVLFQGPGSLPETGGGSDYKDDDDKGGGGSGGGGSGGGGSGGGGSGGGGSHHHHHH

SEQ ID NO: 163 - protein, 1297 aa, Artificial Sequence
  SEQ ID NO:3 + A942P + A892P + T572I + S884C + A893C
MFVFLVLLPLVSSQCVNLTTRTQLPPAYTNSFTRGVYYPDKVFRSSVLHSTQDLFLPFFSNVTWFHAIHVSGTNGTKRFDNPVLPFNDGVYFASTEKSNIIRGWIFGTTLDSKTQSLLIVNNATNVVIKVCEFQFCNDPFLGVYYHKNNKSWMESEFRVYSSANNCTFEYVSQPFLMDLEGKQGNFKNLREFVFKNIDGYFKIYSKHTPINLVRDLPQGFSALEPLVDLPIGINITRFQTLLALHRSYLTPGDSSSGWTAGAAAYYVGYLQPRTFLLKYNENGTITDAVDCALDPLSETKCTLKSFTVEKGIYQTSNFRVQPTESIVRFPNITNLCPFGEVFNATRFASVYAWNRKRISNCVADYSVLYNSASFSTFKCYGVSPTKLNDLCFTNVYADSFVIRGDEVRQIAPGQTGKIADYNYKLPDDFTGCVIAWNSNNLDSKVGGNYNYLYRLFRKSNLKPFERDISTEIYQAGSTPCNGVEGFNCYFPLQSYGFQPTNGVGYQPYRVVVLSFELLHAPATVCGPKKSTNLVKNKCVNFNFNGLTGTGVLTESNKKFLPFQQFGRDIADITDAVRDPQTLEILDITPCSFGGVSVITPGTNTSNQVAVLYQDVNCTEVPVAIHADQLTPTWRVYSTGSNVFQTRAGCLIGAEHVNNSYECDIPIGAGICASYQTQTNSPSRAGSVASQSIIAYTMSLGAENSVAYSNNSIAIPTNFTISVTTEILPVSMTKTSVDCTMYICGDSTECSNLLLQYGSFCTQLNRALTGIAVEQDKNTQEVFAQVKQIYKTPPIKDFGGFNFSQILPDPSKPSKRSFIEDLLFNKVTLADAGFIKQYGDCLGDIAARDLICAQKFNGLTVLPPLLTDEMIAQYTSALLAGTITCGWTFGAGPCLQIPFAMQMAYRFNGIGVTQNVLYENQKLIANQFNSAIGKIQDSLSSTPSALGKLQDVVNQNAQALNTLVKQLSSNFGAISSVLNDILSRLDPPEAEVQIDRLITGRLQSLQTYVTQQLIRAAEIRASANLAATKMSECVLGQSKRVDFCGKGYHLMSFPQSAPHGVVFLHVTYVPAQEKNFTTAPAICHDGKAHFPREGVFVSNGTHWFVTQRNFYEPQIITTDNTFVSGNCDVVIGIVNNTVYDPLQPELDSFKEELDKYFKNHTSPDVDLGDISGINASVVNIQKEIDRLNEVAKNLNESLIDLQELGKYEQGSGYIPEAPRDGQAYVRKDGEWVLLSTFLGRSLEVLFQGPGSLPETGGGSDYKDDDDKGGGGSGGGGSGGGGSGGGGSGGGGSHHHHHH

SEQ ID NO: 164 - protein, 1297 aa, Artificial Sequence
  SEQ ID NO:3 + A942P + A892P + N532P + G880C + F888C
MFVFLVLLPLVSSQCVNLTTRTQLPPAYTNSFTRGVYYPDKVFRSSVLHSTQDLFLPFFSNVTWFHAIHVSGTNGTKRFDNPVLPFNDGVYFASTEKSNIIRGWIFGTTLDSKTQSLLIVNNATNVVIKVCEFQFCNDPFLGVYYHKNNKSWMESEFRVYSSANNCTFEYVSQPFLMDLEGKQGNFKNLREFVFKNIDGYFKIYSKHTPINLVRDLPQGFSALEPLVDLPIGINITRFQTLLALHRSYLTPGDSSSGWTAGAAAYYVGYLQPRTFLLKYNENGTITDAVDCALDPLSETKCTLKSFTVEKGIYQTSNFRVQPTESIVRFPNITNLCPFGEVFNATRFASVYAWNRKRISNCVADYSVLYNSASFSTFKCYGVSPTKLNDLCFTNVYADSFVIRGDEVRQIAPGQTGKIADYNYKLPDDFTGCVIAWNSNNLDSKVGGNYNYLYRLFRKSNLKPFERDISTEIYQAGSTPCNGVEGFNCYFPLQSYGFQPTNGVGYQPYRVVVLSFELLHAPATVCGPKKSTPLVKNKCVNFNFNGLTGTGVLTESNKKFLPFQQFGRDIADTTDAVRDPQTLEILDITPCSFGGVSVITPGTNTSNQVAVLYQDVNCTEVPVAIHADQLTPTWRVYSTGSNVFQTRAGCLIGAEHVNNSYECDIPIGAGICASYQTQTNSPSRAGSVASQSIIAYTMSLGAENSVAYSNNSIAIPTNFTISVTTEILPVSMTKTSVDCTMYICGDSTECSNLLLQYGSFCTQLNRALTGIAVEQDKNTQEVFAQVKQIYKTPPIKDFGGFNFSQILPDPSKPSKRSFIEDLLFNKVTLADAGFIKQYGDCLGDIAARDLICAQKFNGLTVLPPLLTDEMIAQYTSALLACTITSGWTCGAGPALQIPFAMQMAYRFNGIGVTQNVLYENQKLIANQFNSAIGKIQDSLSSTPSALGKLQDVVNQNAQALNTLVKQLSSNFGAISSVLNDILSRLDPPEAEVQIDRLITGRLQSLQTYVTQQLIRAAEIRASANLAATKMSECVLGQSKRVDFCGKGYHLMSFPQSAPHGVVFLHVTYVPAQEKNFTTAPAICHDGKAHFPREGVFVSNGTHWFVTQRNFYEPQIITTDNTFVSGNCDVVIGIVNNTVYDPLQPELDSFKEELDKYFKNHTSPDVDLGDISGINASVVNIQKEIDRLNEVAKNLNESLIDLQELGKYEQGSGYIPEAPRDGQAYVRKDGEWVLLSTFLGRSLEVLFQGPGSLPETGGGSDYKDDDDKGGGGSGGGGSGGGGSGGGGSGGGGSHHHHHH

SEQ ID NO: 165 - protein, 1297 aa, Artificial Sequence
  SEQ ID NO:3 + A942P + A892P + N532P + S884C + A893C
MFVFLVLLPLVSSQCVNLTTRTQLPPAYTNSFTRGVYYPDKVFRSSVLHSTQDLFLPFFSNVTWFHAIHVSGTNGTKRFDNPVLPFNDGVYFASTEKSNIIRGWIFGTTLDSKTQSLLIVNNATNVVIKVCEFQFCNDPFLGVYYHKNNKSWMESEFRVYSSANNCTFEYVSQPFLMDLEGKQGNFKNLREFVFKNIDGYFKIYSKHTPINLVRDLPQGFSALEPLVDLPIGINITRFQTLLALHRSYLTPGDSSSGWTAGAAAYYVGYLQPRTFLLKYNENGTITDAVDCALDPLSETKCTLKSFTVEKGIYQTSNFRVQPTESIVRFPNITNLCPFGEVFNATRFASVYAWNRKRISNCVADYSVLYNSASFSTFKCYGVSPTKLNDLCFTNVYADSFVIRGDEVRQIAPGQTGKIADYNYKLPDDFTGCVIAWNSNNLDSKVGGNYNYLYRLFRKSNLKPFERDISTEIYQAGSTPCNGVEGFNCYFPLQSYGFQPTNGVGYQPYRVVVLSFELLHAPATVCGPKKSTPLVKNKCVNFNFNGLTGTGVLTESNKKFLPFQQFGRDIADTTDAVRDPQTLEILDITPCSFGGVSVITPGTNTSNQVAVLYQDVNCTEVPVAIHADQLTPTWRVYSTGSNVFQTRAGCLIGAEHVNNSYECDIPIGAGICASYQTQTNSPSRAGSVASQSIIAYTMSLGAENSVAYSNNSIAIPTNFTISVTTEILPVSMTKTSVDCTMYICGDSTECSNLLLQYGSFCTQLNRALTGIAVEQDKNTQEVFAQVKQIYKTPPIKDFGGFNFSQILPDPSKPSKRSFIEDLLFNKVTLADAGFIKQYGDCLGDIAARDLICAQKFNGLTVLPPLLTDEMIAQYTSALLAGTITCGWTFGAGPCLQIPFAMQMAYRFNGIGVTQNVLYENQKLIANQFNSAIGKIQDSLSSTPSALGKLQDVVNQNAQALNTLVKQLSSNFGAISSVLNDILSRLDPPEAEVQIDRLITGRLQSLQTYVTQQLIRAAEIRASANLAATKMSECVLGQSKRVDFCGKGYHLMSFPQSAPHGVVFLHVTYVPAQEKNFTTAPAICHDGKAHFPREGVFVSNGTHWFVTQRNFYEPQIITTDNTFVSGNCDVVIGIVNNTVYDPLQPELDSFKEELDKYFKNHTSPDVDLGDISGINASVVNIQKEIDRLNEVAKNLNESLIDLQELGKYEQGSGYIPEAPRDGQAYVRKDGEWVLLSTFLGRSLEVLFQGPGSLPETGGGSDYKDDDDKGGGGSGGGGSGGGGSGGGGSGGGGSHHHHHH

SEQ ID NO: 166 - protein, 1297 aa, Artificial Sequence
  SEQ ID NO:3 + A942P + D614N + T572I + N532P
MFVFLVLLPLVSSQCVNLTTRTQLPPAYTNSFTRGVYYPDKVFRSSVLHSTQDLFLPFFSNVTWFHAIHVSGTNGTKRFDNPVLPFNDGVYFASTEKSNIIRGWIFGTTLDSKTQSLLIVNNATNVVIKVCEFQFCNDPFLGVYYHKNNKSWMESEFRVYSSANNCTFEYVSQPFLMDLEGKQGNFKNLREFVFKNIDGYFKIYSKHTPINLVRDLPQGFSALEPLVDLPIGINITRFQTLLALHRSYLTPGDSSSGWTAGAAAYYVGYLQPRTFLLKYNENGTITDAVDCALDPLSETKCTLKSFTVEKGIYQTSNFRVQPTESIVRFPNITNLCPFGEVFNATRFASVYAWNRKRISNCVADYSVLYNSASFSTFKCYGVSPTKLNDLCFTNVYADSFVIRGDEVRQIAPGQTGKIADYNYKLPDDFTGCVIAWNSNNLDSKVGGNYNYLYRLFRKSNLKPFERDISTEIYQAGSTPCNGVEGFNCYFPLQSYGFQPTNGVGYQPYRVVVLSFELLHAPATVCGPKKSTPLVKNKCVNFNFNGLTGTGVLTESNKKFLPFQQFGRDIADITDAVRDPQTLEILDITPCSFGGVSVITPGTNTSNQVAVLYQNVNCTEVPVAIHADQLTPTWRVYSTGSNVFQTRAGCLIGAEHVNNSYECDIPIGAGICASYQTQTNSPSRAGSVASQSIIAYTMSLGAENSVAYSNNSIAIPTNFTISVTTEILPVSMTKTSVDCTMYICGDSTECSNLLLQYGSFCTQLNRALTGIAVEQDKNTQEVFAQVKQIYKTPPIKDFGGFNFSQILPDPSKPSKRSFIEDLLFNKVTLADAGFIKQYGDCLGDIAARDLICAQKFNGLTVLPPLLTDEMIAQYTSALLAGTITSGWTFGAGAALQIPFAMQMAYRFNGIGVTQNVLYENQKLIANQFNSAIGKIQDSLSSTPSALGKLQDVVNQNAQALNTLVKQLSSNFGAISSVLNDILSRLDPPEAEVQIDRLITGRLQSLQTYVTQQLIRAAEIRASANLAATKMSECVLGQSKRVDFCGKGYHLMSFPQSAPHGVVFLHVTYVPAQEKNFTTAPAICHDGKAHFPREGVFVSNGTHWFVTQRNFYEPQIITTDNTFVSGNCDVVIGIVNNTVYDPLQPELDSFKEELDKYFKNHTSPDVDLGDISGINASVVNIQKEIDRLNEVAKNLNESLIDLQELGKYEQGSGYIPEAPRDGQAYVRKDGEWVLLSTFLGRSLEVLFQGPGSLPETGGGSDYKDDDDKGGGGSGGGGSGGGGSGGGGSGGGGSHHHHHH

SEQ ID NO: 167 - protein, 1297 aa, Artificial Sequence
  SEQ ID NO:3 + A942P + D614N + T572I + G880C + F888C
MFVFLVLLPLVSSQCVNLTTRTQLPPAYTNSFTRGVYYPDKVFRSSVLHSTQDLFLPFFSNVTWFHAIHVSGTNGTKRFDNPVLPFNDGVYFASTEKSNIIRGWIFGTTLDSKTQSLLIVNNATNVVIKVCEFQFCNDPFLGVYYHKNNKSWMESEFRVYSSANNCTFEYVSQPFLMDLEGKQGNFKNLREFVFKNIDGYFKIYSKHTPINLVRDLPQGFSALEPLVDLPIGINITRFQTLLALHRSYLTPGDSSSGWTAGAAAYYVGYLQPRTFLLKYNENGTITDAVDCALDPLSETKCTLKSFTVEKGIYQTSNFRVQPTESIVRFPNITNLCPFGEVFNATRFASVYAWNRKRISNCVADYSVLYNSASFSTFKCYGVSPTKLNDLCFTNVYADSFVIRGDEVRQIAPGQTGKIADYNYKLPDDFTGCVIAWNSNNLDSKVGGNYNYLYRLFRKSNLKPFERDISTEIYQAGSTPCNGVEGFNCYFPLQSYGFQPTNGVGYQPYRVVVLSFELLHAPATVCGPKKSTNLVKNKCVNFNFNGLTGTGVLTESNKKFLPFQQFGRDIADITDAVRDPQTLEILDITPCSFGGVSVITPGTNTSNQVAVLYQNVNCTEVPVAIHADQLTPTWRVYSTGSNVFQTRAGCLIGAEHVNNSYECDIPIGAGICASYQTQTNSPSRAGSVASQSIIAYTMSLGAENSVAYSNNSIAIPTNFTISVTTEILPVSMTKTSVDCTMYICGDSTECSNLLLQYGSFCTQLNRALTGIAVEQDKNTQEVFAQVKQIYKTPPIKDFGGFNFSQILPDPSKPSKRSFIEDLLFNKVTLADAGFIKQYGDCLGDIAARDLICAQKFNGLTVLPPLLTDEMIAQYTSALLACTITSGWTCGAGAALQIPFAMQMAYRFNGIGVTQNVLYENQKLIANQFNSAIGKIQDSLSSTPSALGKLQDVVNQNAQALNTLVKQLSSNFGAISSVLNDILSRLDPPEAEVQIDRLITGRLQSLQTYVTQQLIRAAEIRASANLAATKMSECVLGQSKRVDFCGKGYHLMSFPQSAPHGVVFLHVTYVPAQEKNFTTAPAICHDGKAHFPREGVFVSNGTHWFVTQRNFYEPQIITTDNTFVSGNCDVVIGIVNNTVYDPLQPELDSFKEELDKYFKNHTSPDVDLGDISGINASVVNIQKEIDRLNEVAKNLNESLIDLQELGKYEQGSGYIPEAPRDGQAYVRKDGEWVLLSTFLGRSLEVLFQGPGSLPETGGGSDYKDDDDKGGGGSGGGGSGGGGSGGGGSGGGGSHHHHHH

SEQ ID NO: 168 - protein, 1297 aa, Artificial Sequence
  SEQ ID NO:3 + A942P + D614N + T572I + S884C + A893C
MFVFLVLLPLVSSQCVNLTTRTQLPPAYTNSFTRGVYYPDKVFRSSVLHSTQDLFLPFFSNVTWFHAIHVSGTNGTKRFDNPVLPFNDGVYFASTEKSNIIRGWIFGTTLDSKTQSLLIVNNATNVVIKVCEFQFCNDPFLGVYYHKNNKSWMESEFRVYSSANNCTFEYVSQPFLMDLEGKQGNFKNLREFVFKNIDGYFKIYSKHTPINLVRDLPQGFSALEPLVDLPIGINITRFQTLLALHRSYLTPGDSSSGWTAGAAAYYVGYLQPRTFLLKYNENGTITDAVDCALDPLSETKCTLKSFTVEKGIYQTSNFRVQPTESIVRFPNITNLCPFGEVFNATRFASVYAWNRKRISNCVADYSVLYNSASFSTFKCYGVSPTKLNDLCFTNVYADSFVIRGDEVRQIAPGQTGKIADYNYKLPDDFTGCVIAWNSNNLDSKVGGNYNYLYRLFRKSNLKPFERDISTEIYQAGSTPCNGVEGFNCYFPLQSYGFQPTNGVGYQPYRVVVLSFELLHAPATVCGPKKSTNLVKNKCVNFNFNGLTGTGVLTESNKKFLPFQQFGRDIADITDAVRDPQTLEILDITPCSFGGVSVITPGTNTSNQVAVLYQNVNCTEVPVAIHADQLTPTWRVYSTGSNVFQTRAGCLIGAEHVNNSYECDIPIGAGICASYQTQTNSPSRAGSVASQSIIAYTMSLGAENSVAYSNNSIAIPTNFTISVTTEILPVSMTKTSVDCTMYICGDSTECSNLLLQYGSFCTQLNRALTGIAVEQDKNTQEVFAQVKQIYKTPPIKDFGGFNFSQILPDPSKPSKRSFIEDLLFNKVTLADAGFIKQYGDCLGDIAARDLICAQKFNGLTVLPPLLTDEMIAQYTSALLAGTITCGWTFGAGACLQIPFAMQMAYRFNGIGVTQNVLYENQKLIANQFNSAIGKIQDSLSSTPSALGKLQDVVNQNAQALNTLVKQLSSNFGAISSVLNDILSRLDPPEAEVQIDRLITGRLQSLQTYVTQQLIRAAEIRASANLAATKMSECVLGQSKRVDFCGKGYHLMSFPQSAPHGVVFLHVTYVPAQEKNFTTAPAICHDGKAHFPREGVFVSNGTHWFVTQRNFYEPQIITTDNTFVSGNCDVVIGIVNNTVYDPLQPELDSFKEELDKYFKNHTSPDVDLGDISGINASVVNIQKEIDRLNEVAKNLNESLIDLQELGKYEQGSGYIPEAPRDGQAYVRKDGEWVLLSTFLGRSLEVLFQGPGSLPETGGGSDYKDDDDKGGGGSGGGGSGGGGSGGGGSGGGGSHHHHHH

SEQ ID NO: 169 - protein, 1297 aa, Artificial Sequence
  SEQ ID NO:3 + A942P + D614N + N532P + G880C + F888C
MFVFLVLLPLVSSQCVNLTTRTQLPPAYTNSFTRGVYYPDKVFRSSVLHSTQDLFLPFFSNVTWFHAIHVSGTNGTKRFDNPVLPFNDGVYFASTEKSNIIRGWIFGTTLDSKTQSLLIVNNATNVVIKVCEFQFCNDPFLGVYYHKNNKSWMESEFRVYSSANNCTFEYVSQPFLMDLEGKQGNFKNLREFVFKNIDGYFKIYSKHTPINLVRDLPQGFSALEPLVDLPIGINITRFQTLLALHRSYLTPGDSSSGWTAGAAAYYVGYLQPRTFLLKYNENGTITDAVDCALDPLSETKCTLKSFTVEKGIYQTSNFRVQPTESIVRFPNITNLCPFGEVFNATRFASVYAWNRKRISNCVADYSVLYNSASFSTFKCYGVSPTKLNDLCFTNVYADSFVIRGDEVRQIAPGQTGKIADYNYKLPDDFTGCVIAWNSNNLDSKVGGNYNYLYRLFRKSNLKPFERDISTEIYQAGSTPCNGVEGFNCYFPLQSYGFQPTNGVGYQPYRVVVLSFELLHAPATVCGPKKSTPLVKNKCVNFNFNGLTGTGVLTESNKKFLPFQQFGRDIADTTDAVRDPQTLEILDITPCSFGGVSVITPGTNTSNQVAVLYQNVNCTEVPVAIHADQLTPTWRVYSTGSNVFQTRAGCLIGAEHVNNSYECDIPIGAGICASYQTQTNSPSRAGSVASQSIIAYTMSLGAENSVAYSNNSIAIPTNFTISVTTEILPVSMTKTSVDCTMYICGDSTECSNLLLQYGSFCTQLNRALTGIAVEQDKNTQEVFAQVKQIYKTPPIKDFGGFNFSQILPDPSKPSKRSFIEDLLFNKVTLADAGFIKQYGDCLGDIAARDLICAQKFNGLTVLPPLLTDEMIAQYTSALLACTITSGWTCGAGAALQIPFAMQMAYRFNGIGVTQNVLYENQKLIANQFNSAIGKIQDSLSSTPSALGKLQDVVNQNAQALNTLVKQLSSNFGAISSVLNDILSRLDPPEAEVQIDRLITGRLQSLQTYVTQQLIRAAEIRASANLAATKMSECVLGQSKRVDFCGKGYHLMSFPQSAPHGVVFLHVTYVPAQEKNFTTAPAICHDGKAHFPREGVFVSNGTHWFVTQRNFYEPQIITTDNTFVSGNCDVVIGIVNNTVYDPLQPELDSFKEELDKYFKNHTSPDVDLGDISGINASVVNIQKEIDRLNEVAKNLNESLIDLQELGKYEQGSGYIPEAPRDGQAYVRKDGEWVLLSTFLGRSLEVLFQGPGSLPETGGGSDYKDDDDKGGGGSGGGGSGGGGSGGGGSGGGGSHHHHHH

SEQ ID NO: 170 - protein, 1297 aa, Artificial Sequence
  SEQ ID NO:3 + A942P + D614N + N532P + S884C + A893C
MFVFLVLLPLVSSQCVNLTTRTQLPPAYTNSFTRGVYYPDKVFRSSVLHSTQDLFLPFFSNVTWFHAIHVSGTNGTKRFDNPVLPFNDGVYFASTEKSNIIRGWIFGTTLDSKTQSLLIVNNATNVVIKVCEFQFCNDPFLGVYYHKNNKSWMESEFRVYSSANNCTFEYVSQPFLMDLEGKQGNFKNLREFVFKNIDGYFKIYSKHTPINLVRDLPQGFSALEPLVDLPIGINITRFQTLLALHRSYLTPGDSSSGWTAGAAAYYVGYLQPRTFLLKYNENGTITDAVDCALDPLSETKCTLKSFTVEKGIYQTSNFRVQPTESIVRFPNITNLCPFGEVFNATRFASVYAWNRKRISNCVADYSVLYNSASFSTFKCYGVSPTKLNDLCFTNVYADSFVIRGDEVRQIAPGQTGKIADYNYKLPDDFTGCVIAWNSNNLDSKVGGNYNYLYRLFRKSNLKPFERDISTEIYQAGSTPCNGVEGFNCYFPLQSYGFQPTNGVGYQPYRVVVLSFELLHAPATVCGPKKSTPLVKNKCVNFNFNGLTGTGVLTESNKKFLPFQQFGRDIADTTDAVRDPQTLEILDITPCSFGGVSVITPGTNTSNQVAVLYQNVNCTEVPVAIHADQLTPTWRVYSTGSNVFQTRAGCLIGAEHVNNSYECDIPIGAGICASYQTQTNSPSRAGSVASQSIIAYTMSLGAENSVAYSNNSIAIPTNFTISVTTEILPVSMTKTSVDCTMYICGDSTECSNLLLQYGSFCTQLNRALTGIAVEQDKNTQEVFAQVKQIYKTPPIKDFGGFNFSQILPDPSKPSKRSFIEDLLFNKVTLADAGFIKQYGDCLGDIAARDLICAQKFNGLTVLPPLLTDEMIAQYTSALLAGTITCGWTFGAGACLQIPFAMQMAYRFNGIGVTQNVLYENQKLIANQFNSAIGKIQDSLSSTPSALGKLQDVVNQNAQALNTLVKQLSSNFGAISSVLNDILSRLDPPEAEVQIDRLITGRLQSLQTYVTQQLIRAAEIRASANLAATKMSECVLGQSKRVDFCGKGYHLMSFPQSAPHGVVFLHVTYVPAQEKNFTTAPAICHDGKAHFPREGVFVSNGTHWFVTQRNFYEPQIITTDNTFVSGNCDVVIGIVNNTVYDPLQPELDSFKEELDKYFKNHTSPDVDLGDISGINASVVNIQKEIDRLNEVAKNLNESLIDLQELGKYEQGSGYIPEAPRDGQAYVRKDGEWVLLSTFLGRSLEVLFQGPGSLPETGGGSDYKDDDDKGGGGSGGGGSGGGGSGGGGSGGGGSHHHHHH

SEQ ID NO: 171 - protein, 1297 aa, Artificial Sequence
  SEQ ID NO:3 + A942P + T572I + N532P + G880C + F888C
MFVFLVLLPLVSSQCVNLTTRTQLPPAYTNSFTRGVYYPDKVFRSSVLHSTQDLFLPFFSNVTWFHAIHVSGTNGTKRFDNPVLPFNDGVYFASTEKSNIIRGWIFGTTLDSKTQSLLIVNNATNVVIKVCEFQFCNDPFLGVYYHKNNKSWMESEFRVYSSANNCTFEYVSQPFLMDLEGKQGNFKNLREFVFKNIDGYFKIYSKHTPINLVRDLPQGFSALEPLVDLPIGINITRFQTLLALHRSYLTPGDSSSGWTAGAAAYYVGYLQPRTFLLKYNENGTITDAVDCALDPLSETKCTLKSFTVEKGIYQTSNFRVQPTESIVRFPNITNLCPFGEVFNATRFASVYAWNRKRISNCVADYSVLYNSASFSTFKCYGVSPTKLNDLCFTNVYADSFVIRGDEVRQIAPGQTGKIADYNYKLPDDFTGCVIAWNSNNLDSKVGGNYNYLYRLFRKSNLKPFERDISTEIYQAGSTPCNGVEGFNCYFPLQSYGFQPTNGVGYQPYRVVVLSFELLHAPATVCGPKKSTPLVKNKCVNFNFNGLTGTGVLTESNKKFLPFQQFGRDIADITDAVRDPQTLEILDITPCSFGGVSVITPGTNTSNQVAVLYQDVNCTEVPVAIHADQLTPTWRVYSTGSNVFQTRAGCLIGAEHVNNSYECDIPIGAGICASYQTQTNSPSRAGSVASQSIIAYTMSLGAENSVAYSNNSIAIPTNFTISVTTEILPVSMTKTSVDCTMYICGDSTECSNLLLQYGSFCTQLNRALTGIAVEQDKNTQEVFAQVKQIYKTPPIKDFGGFNFSQILPDPSKPSKRSFIEDLLFNKVTLADAGFIKQYGDCLGDIAARDLICAQKFNGLTVLPPLLTDEMIAQYTSALLACTITSGWTCGAGAALQIPFAMQMAYRFNGIGVTQNVLYENQKLIANQFNSAIGKIQDSLSSTPSALGKLQDVVNQNAQALNTLVKQLSSNFGAISSVLNDILSRLDPPEAEVQIDRLITGRLQSLQTYVTQQLIRAAEIRASANLAATKMSECVLGQSKRVDFCGKGYHLMSFPQSAPHGVVFLHVTYVPAQEKNFTTAPAICHDGKAHFPREGVFVSNGTHWFVTQRNFYEPQIITTDNTFVSGNCDVVIGIVNNTVYDPLQPELDSFKEELDKYFKNHTSPDVDLGDISGINASVVNIQKEIDRLNEVAKNLNESLIDLQELGKYEQGSGYIPEAPRDGQAYVRKDGEWVLLSTFLGRSLEVLFQGPGSLPETGGGSDYKDDDDKGGGGSGGGGSGGGGSGGGGSGGGGSHHHHHH

SEQ ID NO: 172 - protein, 1297 aa, Artificial Sequence
  SEQ ID NO:3 + A942P + T572I + N532P + S884C + A893C
MFVFLVLLPLVSSQCVNLTTRTQLPPAYTNSFTRGVYYPDKVFRSSVLHSTQDLFLPFFSNVTWFHAIHVSGTNGTKRFDNPVLPFNDGVYFASTEKSNIIRGWIFGTTLDSKTQSLLIVNNATNVVIKVCEFQFCNDPFLGVYYHKNNKSWMESEFRVYSSANNCTFEYVSQPFLMDLEGKQGNFKNLREFVFKNIDGYFKIYSKHTPINLVRDLPQGFSALEPLVDLPIGINITRFQTLLALHRSYLTPGDSSSGWTAGAAAYYVGYLQPRTFLLKYNENGTITDAVDCALDPLSETKCTLKSFTVEKGIYQTSNFRVQPTESIVRFPNITNLCPFGEVFNATRFASVYAWNRKRISNCVADYSVLYNSASFSTFKCYGVSPTKLNDLCFTNVYADSFVIRGDEVRQIAPGQTGKIADYNYKLPDDFTGCVIAWNSNNLDSKVGGNYNYLYRLFRKSNLKPFERDISTEIYQAGSTPCNGVEGFNCYFPLQSYGFQPTNGVGYQPYRVVVLSFELLHAPATVCGPKKSTPLVKNKCVNFNFNGLTGTGVLTESNKKFLPFQQFGRDIADITDAVRDPQTLEILDITPCSFGGVSVITPGTNTSNQVAVLYQDVNCTEVPVAIHADQLTPTWRVYSTGSNVFQTRAGCLIGAEHVNNSYECDIPIGAGICASYQTQTNSPSRAGSVASQSIIAYTMSLGAENSVAYSNNSIAIPTNFTISVTTEILPVSMTKTSVDCTMYICGDSTECSNLLLQYGSFCTQLNRALTGIAVEQDKNTQEVFAQVKQIYKTPPIKDFGGFNFSQILPDPSKPSKRSFIEDLLFNKVTLADAGFIKQYGDCLGDIAARDLICAQKFNGLTVLPPLLTDEMIAQYTSALLAGTITCGWTFGAGACLQIPFAMQMAYRFNGIGVTQNVLYENQKLIANQFNSAIGKIQDSLSSTPSALGKLQDVVNQNAQALNTLVKQLSSNFGAISSVLNDILSRLDPPEAEVQIDRLITGRLQSLQTYVTQQLIRAAEIRASANLAATKMSECVLGQSKRVDFCGKGYHLMSFPQSAPHGVVFLHVTYVPAQEKNFTTAPAICHDGKAHFPREGVFVSNGTHWFVTQRNFYEPQIITTDNTFVSGNCDVVIGIVNNTVYDPLQPELDSFKEELDKYFKNHTSPDVDLGDISGINASVVNIQKEIDRLNEVAKNLNESLIDLQELGKYEQGSGYIPEAPRDGQAYVRKDGEWVLLSTFLGRSLEVLFQGPGSLPETGGGSDYKDDDDKGGGGSGGGGSGGGGSGGGGSGGGGSHHHHHH

SEQ ID NO: 173 - protein, 1297 aa, Artificial Sequence
  SEQ ID NO:3 + A892P + D614N + T572I + N532P
MFVFLVLLPLVSSQCVNLTTRTQLPPAYTNSFTRGVYYPDKVFRSSVLHSTQDLFLPFFSNVTWFHAIHVSGTNGTKRFDNPVLPFNDGVYFASTEKSNIIRGWIFGTTLDSKTQSLLIVNNATNVVIKVCEFQFCNDPFLGVYYHKNNKSWMESEFRVYSSANNCTFEYVSQPFLMDLEGKQGNFKNLREFVFKNIDGYFKIYSKHTPINLVRDLPQGFSALEPLVDLPIGINITRFQTLLALHRSYLTPGDSSSGWTAGAAAYYVGYLQPRTFLLKYNENGTITDAVDCALDPLSETKCTLKSFTVEKGIYQTSNFRVQPTESIVRFPNITNLCPFGEVFNATRFASVYAWNRKRISNCVADYSVLYNSASFSTFKCYGVSPTKLNDLCFTNVYADSFVIRGDEVRQIAPGQTGKIADYNYKLPDDFTGCVIAWNSNNLDSKVGGNYNYLYRLFRKSNLKPFERDISTEIYQAGSTPCNGVEGFNCYFPLQSYGFQPTNGVGYQPYRVVVLSFELLHAPATVCGPKKSTPLVKNKCVNFNFNGLTGTGVLTESNKKFLPFQQFGRDIADITDAVRDPQTLEILDITPCSFGGVSVITPGTNTSNQVAVLYQNVNCTEVPVAIHADQLTPTWRVYSTGSNVFQTRAGCLIGAEHVNNSYECDIPIGAGICASYQTQTNSPSRAGSVASQSIIAYTMSLGAENSVAYSNNSIAIPTNFTISVTTEILPVSMTKTSVDCTMYICGDSTECSNLLLQYGSFCTQLNRALTGIAVEQDKNTQEVFAQVKQIYKTPPIKDFGGFNFSQILPDPSKPSKRSFIEDLLFNKVTLADAGFIKQYGDCLGDIAARDLICAQKFNGLTVLPPLLTDEMIAQYTSALLAGTITSGWTFGAGPALQIPFAMQMAYRFNGIGVTQNVLYENQKLIANQFNSAIGKIQDSLSSTASALGKLQDVVNQNAQALNTLVKQLSSNFGAISSVLNDILSRLDPPEAEVQIDRLITGRLQSLQTYVTQQLIRAAEIRASANLAATKMSECVLGQSKRVDFCGKGYHLMSFPQSAPHGVVFLHVTYVPAQEKNFTTAPAICHDGKAHFPREGVFVSNGTHWFVTQRNFYEPQIITTDNTFVSGNCDVVIGIVNNTVYDPLQPELDSFKEELDKYFKNHTSPDVDLGDISGINASVVNIQKEIDRLNEVAKNLNESLIDLQELGKYEQGSGYIPEAPRDGQAYVRKDGEWVLLSTFLGRSLEVLFQGPGSLPETGGGSDYKDDDDKGGGGSGGGGSGGGGSGGGGSGGGGSHHHHHH

SEQ ID NO: 174 - protein, 1297 aa, Artificial Sequence
  SEQ ID NO:3 + A892P + D614N + T572I + G880C + F888C
MFVFLVLLPLVSSQCVNLTTRTQLPPAYTNSFTRGVYYPDKVFRSSVLHSTQDLFLPFFSNVTWFHAIHVSGTNGTKRFDNPVLPFNDGVYFASTEKSNIIRGWIFGTTLDSKTQSLLIVNNATNVVIKVCEFQFCNDPFLGVYYHKNNKSWMESEFRVYSSANNCTFEYVSQPFLMDLEGKQGNFKNLREFVFKNIDGYFKIYSKHTPINLVRDLPQGFSALEPLVDLPIGINITRFQTLLALHRSYLTPGDSSSGWTAGAAAYYVGYLQPRTFLLKYNENGTITDAVDCALDPLSETKCTLKSFTVEKGIYQTSNFRVQPTESIVRFPNITNLCPFGEVFNATRFASVYAWNRKRISNCVADYSVLYNSASFSTFKCYGVSPTKLNDLCFTNVYADSFVIRGDEVRQIAPGQTGKIADYNYKLPDDFTGCVIAWNSNNLDSKVGGNYNYLYRLFRKSNLKPFERDISTEIYQAGSTPCNGVEGFNCYFPLQSYGFQPTNGVGYQPYRVVVLSFELLHAPATVCGPKKSTNLVKNKCVNFNFNGLTGTGVLTESNKKFLPFQQFGRDIADITDAVRDPQTLEILDITPCSFGGVSVITPGTNTSNQVAVLYQNVNCTEVPVAIHADQLTPTWRVYSTGSNVFQTRAGCLIGAEHVNNSYECDIPIGAGICASYQTQTNSPSRAGSVASQSIIAYTMSLGAENSVAYSNNSIAIPTNFTISVTTEILPVSMTKTSVDCTMYICGDSTECSNLLLQYGSFCTQLNRALTGIAVEQDKNTQEVFAQVKQIYKTPPIKDFGGFNFSQILPDPSKPSKRSFIEDLLFNKVTLADAGFIKQYGDCLGDIAARDLICAQKFNGLTVLPPLLTDEMIAQYTSALLACTITSGWTCGAGPALQIPFAMQMAYRFNGIGVTQNVLYENQKLIANQFNSAIGKIQDSLSSTASALGKLQDVVNQNAQALNTLVKQLSSNFGAISSVLNDILSRLDPPEAEVQIDRLITGRLQSLQTYVTQQLIRAAEIRASANLAATKMSECVLGQSKRVDFCGKGYHLMSFPQSAPHGVVFLHVTYVPAQEKNFTTAPAICHDGKAHFPREGVFVSNGTHWFVTQRNFYEPQIITTDNTFVSGNCDVVIGIVNNTVYDPLQPELDSFKEELDKYFKNHTSPDVDLGDISGINASVVNIQKEIDRLNEVAKNLNESLIDLQELGKYEQGSGYIPEAPRDGQAYVRKDGEWVLLSTFLGRSLEVLFQGPGSLPETGGGSDYKDDDDKGGGGSGGGGSGGGGSGGGGSGGGGSHHHHHH

SEQ ID NO: 175 - protein, 1297 aa, Artificial Sequence
  SEQ ID NO:3 + A892P + D614N + T572I + S884C + A893C
MFVFLVLLPLVSSQCVNLTTRTQLPPAYTNSFTRGVYYPDKVFRSSVLHSTQDLFLPFFSNVTWFHAIHVSGTNGTKRFDNPVLPFNDGVYFASTEKSNIIRGWIFGTTLDSKTQSLLIVNNATNVVIKVCEFQFCNDPFLGVYYHKNNKSWMESEFRVYSSANNCTFEYVSQPFLMDLEGKQGNFKNLREFVFKNIDGYFKIYSKHTPINLVRDLPQGFSALEPLVDLPIGINITRFQTLLALHRSYLTPGDSSSGWTAGAAAYYVGYLQPRTFLLKYNENGTITDAVDCALDPLSETKCTLKSFTVEKGIYQTSNFRVQPTESIVRFPNITNLCPFGEVFNATRFASVYAWNRKRISNCVADYSVLYNSASFSTFKCYGVSPTKLNDLCFTNVYADSFVIRGDEVRQIAPGQTGKIADYNYKLPDDFTGCVIAWNSNNLDSKVGGNYNYLYRLFRKSNLKPFERDISTEIYQAGSTPCNGVEGFNCYFPLQSYGFQPTNGVGYQPYRVVVLSFELLHAPATVCGPKKSTNLVKNKCVNFNFNGLTGTGVLTESNKKFLPFQQFGRDIADITDAVRDPQTLEILDITPCSFGGVSVITPGTNTSNQVAVLYQNVNCTEVPVAIHADQLTPTWRVYSTGSNVFQTRAGCLIGAEHVNNSYECDIPIGAGICASYQTQTNSPSRAGSVASQSIIAYTMSLGAENSVAYSNNSIAIPTNFTISVTTEILPVSMTKTSVDCTMYICGDSTECSNLLLQYGSFCTQLNRALTGIAVEQDKNTQEVFAQVKQIYKTPPIKDFGGFNFSQILPDPSKPSKRSFIEDLLFNKVTLADAGFIKQYGDCLGDIAARDLICAQKFNGLTVLPPLLTDEMIAQYTSALLAGTITCGWTFGAGPCLQIPFAMQMAYRFNGIGVTQNVLYENQKLIANQFNSAIGKIQDSLSSTASALGKLQDVVNQNAQALNTLVKQLSSNFGAISSVLNDILSRLDPPEAEVQIDRLITGRLQSLQTYVTQQLIRAAEIRASANLAATKMSECVLGQSKRVDFCGKGYHLMSFPQSAPHGVVFLHVTYVPAQEKNFTTAPAICHDGKAHFPREGVFVSNGTHWFVTQRNFYEPQIITTDNTFVSGNCDVVIGIVNNTVYDPLQPELDSFKEELDKYFKNHTSPDVDLGDISGINASVVNIQKEIDRLNEVAKNLNESLIDLQELGKYEQGSGYIPEAPRDGQAYVRKDGEWVLLSTFLGRSLEVLFQGPGSLPETGGGSDYKDDDDKGGGGSGGGGSGGGGSGGGGSGGGGSHHHHHH

SEQ ID NO: 176 - protein, 1297 aa, Artificial Sequence
  SEQ ID NO:3 + A892P + D614N + N532P + G880C + F888C
MFVFLVLLPLVSSQCVNLTTRTQLPPAYTNSFTRGVYYPDKVFRSSVLHSTQDLFLPFFSNVTWFHAIHVSGTNGTKRFDNPVLPFNDGVYFASTEKSNIIRGWIFGTTLDSKTQSLLIVNNATNVVIKVCEFQFCNDPFLGVYYHKNNKSWMESEFRVYSSANNCTFEYVSQPFLMDLEGKQGNFKNLREFVFKNIDGYFKIYSKHTPINLVRDLPQGFSALEPLVDLPIGINITRFQTLLALHRSYLTPGDSSSGWTAGAAAYYVGYLQPRTFLLKYNENGTITDAVDCALDPLSETKCTLKSFTVEKGIYQTSNFRVQPTESIVRFPNITNLCPFGEVFNATRFASVYAWNRKRISNCVADYSVLYNSASFSTFKCYGVSPTKLNDLCFTNVYADSFVIRGDEVRQIAPGQTGKIADYNYKLPDDFTGCVIAWNSNNLDSKVGGNYNYLYRLFRKSNLKPFERDISTEIYQAGSTPCNGVEGFNCYFPLQSYGFQPTNGVGYQPYRVVVLSFELLHAPATVCGPKKSTPLVKNKCVNFNFNGLTGTGVLTESNKKFLPFQQFGRDIADTTDAVRDPQTLEILDITPCSFGGVSVITPGTNTSNQVAVLYQNVNCTEVPVAIHADQLTPTWRVYSTGSNVFQTRAGCLIGAEHVNNSYECDIPIGAGICASYQTQTNSPSRAGSVASQSIIAYTMSLGAENSVAYSNNSIAIPTNFTISVTTEILPVSMTKTSVDCTMYICGDSTECSNLLLQYGSFCTQLNRALTGIAVEQDKNTQEVFAQVKQIYKTPPIKDFGGFNFSQILPDPSKPSKRSFIEDLLFNKVTLADAGFIKQYGDCLGDIAARDLICAQKFNGLTVLPPLLTDEMIAQYTSALLACTITSGWTCGAGPALQIPFAMQMAYRFNGIGVTQNVLYENQKLIANQFNSAIGKIQDSLSSTASALGKLQDVVNQNAQALNTLVKQLSSNFGAISSVLNDILSRLDPPEAEVQIDRLITGRLQSLQTYVTQQLIRAAEIRASANLAATKMSECVLGQSKRVDFCGKGYHLMSFPQSAPHGVVFLHVTYVPAQEKNFTTAPAICHDGKAHFPREGVFVSNGTHWFVTQRNFYEPQIITTDNTFVSGNCDVVIGIVNNTVYDPLQPELDSFKEELDKYFKNHTSPDVDLGDISGINASVVNIQKEIDRLNEVAKNLNESLIDLQELGKYEQGSGYIPEAPRDGQAYVRKDGEWVLLSTFLGRSLEVLFQGPGSLPETGGGSDYKDDDDKGGGGSGGGGSGGGGSGGGGSGGGGSHHHHHH

SEQ ID NO: 177 - protein, 1297 aa, Artificial Sequence
  SEQ ID NO:3 + A892P + D614N + N532P + S884C + A893C
MFVFLVLLPLVSSQCVNLTTRTQLPPAYTNSFTRGVYYPDKVFRSSVLHSTQDLFLPFFSNVTWFHAIHVSGTNGTKRFDNPVLPFNDGVYFASTEKSNIIRGWIFGTTLDSKTQSLLIVNNATNVVIKVCEFQFCNDPFLGVYYHKNNKSWMESEFRVYSSANNCTFEYVSQPFLMDLEGKQGNFKNLREFVFKNIDGYFKIYSKHTPINLVRDLPQGFSALEPLVDLPIGINITRFQTLLALHRSYLTPGDSSSGWTAGAAAYYVGYLQPRTFLLKYNENGTITDAVDCALDPLSETKCTLKSFTVEKGIYQTSNFRVQPTESIVRFPNITNLCPFGEVFNATRFASVYAWNRKRISNCVADYSVLYNSASFSTFKCYGVSPTKLNDLCFTNVYADSFVIRGDEVRQIAPGQTGKIADYNYKLPDDFTGCVIAWNSNNLDSKVGGNYNYLYRLFRKSNLKPFERDISTEIYQAGSTPCNGVEGFNCYFPLQSYGFQPTNGVGYQPYRVVVLSFELLHAPATVCGPKKSTPLVKNKCVNFNFNGLTGTGVLTESNKKFLPFQQFGRDIADTTDAVRDPQTLEILDITPCSFGGVSVITPGTNTSNQVAVLYQNVNCTEVPVAIHADQLTPTWRVYSTGSNVFQTRAGCLIGAEHVNNSYECDIPIGAGICASYQTQTNSPSRAGSVASQSIIAYTMSLGAENSVAYSNNSIAIPTNFTISVTTEILPVSMTKTSVDCTMYICGDSTECSNLLLQYGSFCTQLNRALTGIAVEQDKNTQEVFAQVKQIYKTPPIKDFGGFNFSQILPDPSKPSKRSFIEDLLFNKVTLADAGFIKQYGDCLGDIAARDLICAQKFNGLTVLPPLLTDEMIAQYTSALLAGTITCGWTFGAGPCLQIPFAMQMAYRFNGIGVTQNVLYENQKLIANQFNSAIGKIQDSLSSTASALGKLQDVVNQNAQALNTLVKQLSSNFGAISSVLNDILSRLDPPEAEVQIDRLITGRLQSLQTYVTQQLIRAAEIRASANLAATKMSECVLGQSKRVDFCGKGYHLMSFPQSAPHGVVFLHVTYVPAQEKNFTTAPAICHDGKAHFPREGVFVSNGTHWFVTQRNFYEPQIITTDNTFVSGNCDVVIGIVNNTVYDPLQPELDSFKEELDKYFKNHTSPDVDLGDISGINASVVNIQKEIDRLNEVAKNLNESLIDLQELGKYEQGSGYIPEAPRDGQAYVRKDGEWVLLSTFLGRSLEVLFQGPGSLPETGGGSDYKDDDDKGGGGSGGGGSGGGGSGGGGSGGGGSHHHHHH

SEQ ID NO: 178 - protein, 1297 aa, Artificial Sequence
  SEQ ID NO:3 + A892P + T572I + N532P + G880C + F888C
MFVFLVLLPLVSSQCVNLTTRTQLPPAYTNSFTRGVYYPDKVFRSSVLHSTQDLFLPFFSNVTWFHAIHVSGTNGTKRFDNPVLPFNDGVYFASTEKSNIIRGWIFGTTLDSKTQSLLIVNNATNVVIKVCEFQFCNDPFLGVYYHKNNKSWMESEFRVYSSANNCTFEYVSQPFLMDLEGKQGNFKNLREFVFKNIDGYFKIYSKHTPINLVRDLPQGFSALEPLVDLPIGINITRFQTLLALHRSYLTPGDSSSGWTAGAAAYYVGYLQPRTFLLKYNENGTITDAVDCALDPLSETKCTLKSFTVEKGIYQTSNFRVQPTESIVRFPNITNLCPFGEVFNATRFASVYAWNRKRISNCVADYSVLYNSASFSTFKCYGVSPTKLNDLCFTNVYADSFVIRGDEVRQIAPGQTGKIADYNYKLPDDFTGCVIAWNSNNLDSKVGGNYNYLYRLFRKSNLKPFERDISTEIYQAGSTPCNGVEGFNCYFPLQSYGFQPTNGVGYQPYRVVVLSFELLHAPATVCGPKKSTPLVKNKCVNFNFNGLTGTGVLTESNKKFLPFQQFGRDIADITDAVRDPQTLEILDITPCSFGGVSVITPGTNTSNQVAVLYQDVNCTEVPVAIHADQLTPTWRVYSTGSNVFQTRAGCLIGAEHVNNSYECDIPIGAGICASYQTQTNSPSRAGSVASQSIIAYTMSLGAENSVAYSNNSIAIPTNFTISVTTEILPVSMTKTSVDCTMYICGDSTECSNLLLQYGSFCTQLNRALTGIAVEQDKNTQEVFAQVKQIYKTPPIKDFGGFNFSQILPDPSKPSKRSFIEDLLFNKVTLADAGFIKQYGDCLGDIAARDLICAQKFNGLTVLPPLLTDEMIAQYTSALLACTITSGWTCGAGPALQIPFAMQMAYRFNGIGVTQNVLYENQKLIANQFNSAIGKIQDSLSSTASALGKLQDVVNQNAQALNTLVKQLSSNFGAISSVLNDILSRLDPPEAEVQIDRLITGRLQSLQTYVTQQLIRAAEIRASANLAATKMSECVLGQSKRVDFCGKGYHLMSFPQSAPHGVVFLHVTYVPAQEKNFTTAPAICHDGKAHFPREGVFVSNGTHWFVTQRNFYEPQIITTDNTFVSGNCDVVIGIVNNTVYDPLQPELDSFKEELDKYFKNHTSPDVDLGDISGINASVVNIQKEIDRLNEVAKNLNESLIDLQELGKYEQGSGYIPEAPRDGQAYVRKDGEWVLLSTFLGRSLEVLFQGPGSLPETGGGSDYKDDDDKGGGGSGGGGSGGGGSGGGGSGGGGSHHHHHH

SEQ ID NO: 179 - protein, 1297 aa, Artificial Sequence
  SEQ ID NO:3 + A892P + T572I + N532P + S884C + A893C
MFVFLVLLPLVSSQCVNLTTRTQLPPAYTNSFTRGVYYPDKVFRSSVLHSTQDLFLPFFSNVTWFHAIHVSGTNGTKRFDNPVLPFNDGVYFASTEKSNIIRGWIFGTTLDSKTQSLLIVNNATNVVIKVCEFQFCNDPFLGVYYHKNNKSWMESEFRVYSSANNCTFEYVSQPFLMDLEGKQGNFKNLREFVFKNIDGYFKIYSKHTPINLVRDLPQGFSALEPLVDLPIGINITRFQTLLALHRSYLTPGDSSSGWTAGAAAYYVGYLQPRTFLLKYNENGTITDAVDCALDPLSETKCTLKSFTVEKGIYQTSNFRVQPTESIVRFPNITNLCPFGEVFNATRFASVYAWNRKRISNCVADYSVLYNSASFSTFKCYGVSPTKLNDLCFTNVYADSFVIRGDEVRQIAPGQTGKIADYNYKLPDDFTGCVIAWNSNNLDSKVGGNYNYLYRLFRKSNLKPFERDISTEIYQAGSTPCNGVEGFNCYFPLQSYGFQPTNGVGYQPYRVVVLSFELLHAPATVCGPKKSTPLVKNKCVNFNFNGLTGTGVLTESNKKFLPFQQFGRDIADITDAVRDPQTLEILDITPCSFGGVSVITPGTNTSNQVAVLYQDVNCTEVPVAIHADQLTPTWRVYSTGSNVFQTRAGCLIGAEHVNNSYECDIPIGAGICASYQTQTNSPSRAGSVASQSIIAYTMSLGAENSVAYSNNSIAIPTNFTISVTTEILPVSMTKTSVDCTMYICGDSTECSNLLLQYGSFCTQLNRALTGIAVEQDKNTQEVFAQVKQIYKTPPIKDFGGFNFSQILPDPSKPSKRSFIEDLLFNKVTLADAGFIKQYGDCLGDIAARDLICAQKFNGLTVLPPLLTDEMIAQYTSALLAGTITCGWTFGAGPCLQIPFAMQMAYRFNGIGVTQNVLYENQKLIANQFNSAIGKIQDSLSSTASALGKLQDVVNQNAQALNTLVKQLSSNFGAISSVLNDILSRLDPPEAEVQIDRLITGRLQSLQTYVTQQLIRAAEIRASANLAATKMSECVLGQSKRVDFCGKGYHLMSFPQSAPHGVVFLHVTYVPAQEKNFTTAPAICHDGKAHFPREGVFVSNGTHWFVTQRNFYEPQIITTDNTFVSGNCDVVIGIVNNTVYDPLQPELDSFKEELDKYFKNHTSPDVDLGDISGINASVVNIQKEIDRLNEVAKNLNESLIDLQELGKYEQGSGYIPEAPRDGQAYVRKDGEWVLLSTFLGRSLEVLFQGPGSLPETGGGSDYKDDDDKGGGGSGGGGSGGGGSGGGGSGGGGSHHHHHH

SEQ ID NO: 180 - protein, 1297 aa, Artificial Sequence
  SEQ ID NO:3 + D614N + T572I + N532P + G880C + F888C
MFVFLVLLPLVSSQCVNLTTRTQLPPAYTNSFTRGVYYPDKVFRSSVLHSTQDLFLPFFSNVTWFHAIHVSGTNGTKRFDNPVLPFNDGVYFASTEKSNIIRGWIFGTTLDSKTQSLLIVNNATNVVIKVCEFQFCNDPFLGVYYHKNNKSWMESEFRVYSSANNCTFEYVSQPFLMDLEGKQGNFKNLREFVFKNIDGYFKIYSKHTPINLVRDLPQGFSALEPLVDLPIGINITRFQTLLALHRSYLTPGDSSSGWTAGAAAYYVGYLQPRTFLLKYNENGTITDAVDCALDPLSETKCTLKSFTVEKGIYQTSNFRVQPTESIVRFPNITNLCPFGEVFNATRFASVYAWNRKRISNCVADYSVLYNSASFSTFKCYGVSPTKLNDLCFTNVYADSFVIRGDEVRQIAPGQTGKIADYNYKLPDDFTGCVIAWNSNNLDSKVGGNYNYLYRLFRKSNLKPFERDISTEIYQAGSTPCNGVEGFNCYFPLQSYGFQPTNGVGYQPYRVVVLSFELLHAPATVCGPKKSTPLVKNKCVNFNFNGLTGTGVLTESNKKFLPFQQFGRDIADITDAVRDPQTLEILDITPCSFGGVSVITPGTNTSNQVAVLYQNVNCTEVPVAIHADQLTPTWRVYSTGSNVFQTRAGCLIGAEHVNNSYECDIPIGAGICASYQTQTNSPSRAGSVASQSIIAYTMSLGAENSVAYSNNSIAIPTNFTISVTTEILPVSMTKTSVDCTMYICGDSTECSNLLLQYGSFCTQLNRALTGIAVEQDKNTQEVFAQVKQIYKTPPIKDFGGFNFSQILPDPSKPSKRSFIEDLLFNKVTLADAGFIKQYGDCLGDIAARDLICAQKFNGLTVLPPLLTDEMIAQYTSALLACTITSGWTCGAGAALQIPFAMQMAYRFNGIGVTQNVLYENQKLIANQFNSAIGKIQDSLSSTASALGKLQDVVNQNAQALNTLVKQLSSNFGAISSVLNDILSRLDPPEAEVQIDRLITGRLQSLQTYVTQQLIRAAEIRASANLAATKMSECVLGQSKRVDFCGKGYHLMSFPQSAPHGVVFLHVTYVPAQEKNFTTAPAICHDGKAHFPREGVFVSNGTHWFVTQRNFYEPQIITTDNTFVSGNCDVVIGIVNNTVYDPLQPELDSFKEELDKYFKNHTSPDVDLGDISGINASVVNIQKEIDRLNEVAKNLNESLIDLQELGKYEQGSGYIPEAPRDGQAYVRKDGEWVLLSTFLGRSLEVLFQGPGSLPETGGGSDYKDDDDKGGGGSGGGGSGGGGSGGGGSGGGGSHHHHHH

SEQ ID NO: 181 - protein, 1297 aa, Artificial Sequence
  SEQ ID NO:3 + D614N + T572I + N532P + S884C + A893C
MFVFLVLLPLVSSQCVNLTTRTQLPPAYTNSFTRGVYYPDKVFRSSVLHSTQDLFLPFFSNVTWFHAIHVSGTNGTKRFDNPVLPFNDGVYFASTEKSNIIRGWIFGTTLDSKTQSLLIVNNATNVVIKVCEFQFCNDPFLGVYYHKNNKSWMESEFRVYSSANNCTFEYVSQPFLMDLEGKQGNFKNLREFVFKNIDGYFKIYSKHTPINLVRDLPQGFSALEPLVDLPIGINITRFQTLLALHRSYLTPGDSSSGWTAGAAAYYVGYLQPRTFLLKYNENGTITDAVDCALDPLSETKCTLKSFTVEKGIYQTSNFRVQPTESIVRFPNITNLCPFGEVFNATRFASVYAWNRKRISNCVADYSVLYNSASFSTFKCYGVSPTKLNDLCFTNVYADSFVIRGDEVRQIAPGQTGKIADYNYKLPDDFTGCVIAWNSNNLDSKVGGNYNYLYRLFRKSNLKPFERDISTEIYQAGSTPCNGVEGFNCYFPLQSYGFQPTNGVGYQPYRVVVLSFELLHAPATVCGPKKSTPLVKNKCVNFNFNGLTGTGVLTESNKKFLPFQQFGRDIADITDAVRDPQTLEILDITPCSFGGVSVITPGTNTSNQVAVLYQNVNCTEVPVAIHADQLTPTWRVYSTGSNVFQTRAGCLIGAEHVNNSYECDIPIGAGICASYQTQTNSPSRAGSVASQSIIAYTMSLGAENSVAYSNNSIAIPTNFTISVTTEILPVSMTKTSVDCTMYICGDSTECSNLLLQYGSFCTQLNRALTGIAVEQDKNTQEVFAQVKQIYKTPPIKDFGGFNFSQILPDPSKPSKRSFIEDLLFNKVTLADAGFIKQYGDCLGDIAARDLICAQKFNGLTVLPPLLTDEMIAQYTSALLAGTITCGWTFGAGACLQIPFAMQMAYRFNGIGVTQNVLYENQKLIANQFNSAIGKIQDSLSSTASALGKLQDVVNQNAQALNTLVKQLSSNFGAISSVLNDILSRLDPPEAEVQIDRLITGRLQSLQTYVTQQLIRAAEIRASANLAATKMSECVLGQSKRVDFCGKGYHLMSFPQSAPHGVVFLHVTYVPAQEKNFTTAPAICHDGKAHFPREGVFVSNGTHWFVTQRNFYEPQIITTDNTFVSGNCDVVIGIVNNTVYDPLQPELDSFKEELDKYFKNHTSPDVDLGDISGINASVVNIQKEIDRLNEVAKNLNESLIDLQELGKYEQGSGYIPEAPRDGQAYVRKDGEWVLLSTFLGRSLEVLFQGPGSLPETGGGSDYKDDDDKGGGGSGGGGSGGGGSGGGGSGGGGSHHHHHH

SEQ ID NO: 182 - protein, 1297 aa, Artificial Sequence
  SEQ ID NO:3 + A942P + A892P + D614N + T572I + N532P
MFVFLVLLPLVSSQCVNLTTRTQLPPAYTNSFTRGVYYPDKVFRSSVLHSTQDLFLPFFSNVTWFHAIHVSGTNGTKRFDNPVLPFNDGVYFASTEKSNIIRGWIFGTTLDSKTQSLLIVNNATNVVIKVCEFQFCNDPFLGVYYHKNNKSWMESEFRVYSSANNCTFEYVSQPFLMDLEGKQGNFKNLREFVFKNIDGYFKIYSKHTPINLVRDLPQGFSALEPLVDLPIGINITRFQTLLALHRSYLTPGDSSSGWTAGAAAYYVGYLQPRTFLLKYNENGTITDAVDCALDPLSETKCTLKSFTVEKGIYQTSNFRVQPTESIVRFPNITNLCPFGEVFNATRFASVYAWNRKRISNCVADYSVLYNSASFSTFKCYGVSPTKLNDLCFTNVYADSFVIRGDEVRQIAPGQTGKIADYNYKLPDDFTGCVIAWNSNNLDSKVGGNYNYLYRLFRKSNLKPFERDISTEIYQAGSTPCNGVEGFNCYFPLQSYGFQPTNGVGYQPYRVVVLSFELLHAPATVCGPKKSTPLVKNKCVNFNFNGLTGTGVLTESNKKFLPFQQFGRDIADITDAVRDPQTLEILDITPCSFGGVSVITPGTNTSNQVAVLYQNVNCTEVPVAIHADQLTPTWRVYSTGSNVFQTRAGCLIGAEHVNNSYECDIPIGAGICASYQTQTNSPSRAGSVASQSIIAYTMSLGAENSVAYSNNSIAIPTNFTISVTTEILPVSMTKTSVDCTMYICGDSTECSNLLLQYGSFCTQLNRALTGIAVEQDKNTQEVFAQVKQIYKTPPIKDFGGFNFSQILPDPSKPSKRSFIEDLLFNKVTLADAGFIKQYGDCLGDIAARDLICAQKFNGLTVLPPLLTDEMIAQYTSALLAGTITSGWTFGAGPALQIPFAMQMAYRFNGIGVTQNVLYENQKLIANQFNSAIGKIQDSLSSTPSALGKLQDVVNQNAQALNTLVKQLSSNFGAISSVLNDILSRLDPPEAEVQIDRLITGRLQSLQTYVTQQLIRAAEIRASANLAATKMSECVLGQSKRVDFCGKGYHLMSFPQSAPHGVVFLHVTYVPAQEKNFTTAPAICHDGKAHFPREGVFVSNGTHWFVTQRNFYEPQIITTDNTFVSGNCDVVIGIVNNTVYDPLQPELDSFKEELDKYFKNHTSPDVDLGDISGINASVVNIQKEIDRLNEVAKNLNESLIDLQELGKYEQGSGYIPEAPRDGQAYVRKDGEWVLLSTFLGRSLEVLFQGPGSLPETGGGSDYKDDDDKGGGGSGGGGSGGGGSGGGGSGGGGSHHHHHH

SEQ ID NO: 183 - protein, 1297 aa, Artificial Sequence
  SEQ ID NO:3 + A942P + A892P + D614N + T572I + G880C + F888C
MFVFLVLLPLVSSQCVNLTTRTQLPPAYTNSFTRGVYYPDKVFRSSVLHSTQDLFLPFFSNVTWFHAIHVSGTNGTKRFDNPVLPFNDGVYFASTEKSNIIRGWIFGTTLDSKTQSLLIVNNATNVVIKVCEFQFCNDPFLGVYYHKNNKSWMESEFRVYSSANNCTFEYVSQPFLMDLEGKQGNFKNLREFVFKNIDGYFKIYSKHTPINLVRDLPQGFSALEPLVDLPIGINITRFQTLLALHRSYLTPGDSSSGWTAGAAAYYVGYLQPRTFLLKYNENGTITDAVDCALDPLSETKCTLKSFTVEKGIYQTSNFRVQPTESIVRFPNITNLCPFGEVFNATRFASVYAWNRKRISNCVADYSVLYNSASFSTFKCYGVSPTKLNDLCFTNVYADSFVIRGDEVRQIAPGQTGKIADYNYKLPDDFTGCVIAWNSNNLDSKVGGNYNYLYRLFRKSNLKPFERDISTEIYQAGSTPCNGVEGFNCYFPLQSYGFQPTNGVGYQPYRVVVLSFELLHAPATVCGPKKSTNLVKNKCVNFNFNGLTGTGVLTESNKKFLPFQQFGRDIADITDAVRDPQTLEILDITPCSFGGVSVITPGTNTSNQVAVLYQNVNCTEVPVAIHADQLTPTWRVYSTGSNVFQTRAGCLIGAEHVNNSYECDIPIGAGICASYQTQTNSPSRAGSVASQSIIAYTMSLGAENSVAYSNNSIAIPTNFTISVTTEILPVSMTKTSVDCTMYICGDSTECSNLLLQYGSFCTQLNRALTGIAVEQDKNTQEVFAQVKQIYKTPPIKDFGGFNFSQILPDPSKPSKRSFIEDLLFNKVTLADAGFIKQYGDCLGDIAARDLICAQKFNGLTVLPPLLTDEMIAQYTSALLACTITSGWTCGAGPALQIPFAMQMAYRFNGIGVTQNVLYENQKLIANQFNSAIGKIQDSLSSTPSALGKLQDVVNQNAQALNTLVKQLSSNFGAISSVLNDILSRLDPPEAEVQIDRLITGRLQSLQTYVTQQLIRAAEIRASANLAATKMSECVLGQSKRVDFCGKGYHLMSFPQSAPHGVVFLHVTYVPAQEKNFTTAPAICHDGKAHFPREGVFVSNGTHWFVTQRNFYEPQIITTDNTFVSGNCDVVIGIVNNTVYDPLQPELDSFKEELDKYFKNHTSPDVDLGDISGINASVVNIQKEIDRLNEVAKNLNESLIDLQELGKYEQGSGYIPEAPRDGQAYVRKDGEWVLLSTFLGRSLEVLFQGPGSLPETGGGSDYKDDDDKGGGGSGGGGSGGGGSGGGGSGGGGSHHHHHH

SEQ ID NO: 184 - protein, 1297 aa, Artificial Sequence
  SEQ ID NO:3 + A942P + A892P + D614N + T572I + S884C + A893C
MFVFLVLLPLVSSQCVNLTTRTQLPPAYTNSFTRGVYYPDKVFRSSVLHSTQDLFLPFFSNVTWFHAIHVSGTNGTKRFDNPVLPFNDGVYFASTEKSNIIRGWIFGTTLDSKTQSLLIVNNATNVVIKVCEFQFCNDPFLGVYYHKNNKSWMESEFRVYSSANNCTFEYVSQPFLMDLEGKQGNFKNLREFVFKNIDGYFKIYSKHTPINLVRDLPQGFSALEPLVDLPIGINITRFQTLLALHRSYLTPGDSSSGWTAGAAAYYVGYLQPRTFLLKYNENGTITDAVDCALDPLSETKCTLKSFTVEKGIYQTSNFRVQPTESIVRFPNITNLCPFGEVFNATRFASVYAWNRKRISNCVADYSVLYNSASFSTFKCYGVSPTKLNDLCFTNVYADSFVIRGDEVRQIAPGQTGKIADYNYKLPDDFTGCVIAWNSNNLDSKVGGNYNYLYRLFRKSNLKPFERDISTEIYQAGSTPCNGVEGFNCYFPLQSYGFQPTNGVGYQPYRVVVLSFELLHAPATVCGPKKSTNLVKNKCVNFNFNGLTGTGVLTESNKKFLPFQQFGRDIADITDAVRDPQTLEILDITPCSFGGVSVITPGTNTSNQVAVLYQNVNCTEVPVAIHADQLTPTWRVYSTGSNVFQTRAGCLIGAEHVNNSYECDIPIGAGICASYQTQTNSPSRAGSVASQSIIAYTMSLGAENSVAYSNNSIAIPTNFTISVTTEILPVSMTKTSVDCTMYICGDSTECSNLLLQYGSFCTQLNRALTGIAVEQDKNTQEVFAQVKQIYKTPPIKDFGGFNFSQILPDPSKPSKRSFIEDLLFNKVTLADAGFIKQYGDCLGDIAARDLICAQKFNGLTVLPPLLTDEMIAQYTSALLAGTITCGWTFGAGPCLQIPFAMQMAYRFNGIGVTQNVLYENQKLIANQFNSAIGKIQDSLSSTPSALGKLQDVVNQNAQALNTLVKQLSSNFGAISSVLNDILSRLDPPEAEVQIDRLITGRLQSLQTYVTQQLIRAAEIRASANLAATKMSECVLGQSKRVDFCGKGYHLMSFPQSAPHGVVFLHVTYVPAQEKNFTTAPAICHDGKAHFPREGVFVSNGTHWFVTQRNFYEPQIITTDNTFVSGNCDVVIGIVNNTVYDPLQPELDSFKEELDKYFKNHTSPDVDLGDISGINASVVNIQKEIDRLNEVAKNLNESLIDLQELGKYEQGSGYIPEAPRDGQAYVRKDGEWVLLSTFLGRSLEVLFQGPGSLPETGGGSDYKDDDDKGGGGSGGGGSGGGGSGGGGSGGGGSHHHHHH

SEQ ID NO: 185 - protein, 1297 aa, Artificial Sequence
  SEQ ID NO:3 + A942P + A892P + D614N + N532P + G880C + F888C
MFVFLVLLPLVSSQCVNLTTRTQLPPAYTNSFTRGVYYPDKVFRSSVLHSTQDLFLPFFSNVTWFHAIHVSGTNGTKRFDNPVLPFNDGVYFASTEKSNIIRGWIFGTTLDSKTQSLLIVNNATNVVIKVCEFQFCNDPFLGVYYHKNNKSWMESEFRVYSSANNCTFEYVSQPFLMDLEGKQGNFKNLREFVFKNIDGYFKIYSKHTPINLVRDLPQGFSALEPLVDLPIGINITRFQTLLALHRSYLTPGDSSSGWTAGAAAYYVGYLQPRTFLLKYNENGTITDAVDCALDPLSETKCTLKSFTVEKGIYQTSNFRVQPTESIVRFPNITNLCPFGEVFNATRFASVYAWNRKRISNCVADYSVLYNSASFSTFKCYGVSPTKLNDLCFTNVYADSFVIRGDEVRQIAPGQTGKIADYNYKLPDDFTGCVIAWNSNNLDSKVGGNYNYLYRLFRKSNLKPFERDISTEIYQAGSTPCNGVEGFNCYFPLQSYGFQPTNGVGYQPYRVVVLSFELLHAPATVCGPKKSTPLVKNKCVNFNFNGLTGTGVLTESNKKFLPFQQFGRDIADTTDAVRDPQTLEILDITPCSFGGVSVITPGTNTSNQVAVLYQNVNCTEVPVAIHADQLTPTWRVYSTGSNVFQTRAGCLIGAEHVNNSYECDIPIGAGICASYQTQTNSPSRAGSVASQSIIAYTMSLGAENSVAYSNNSIAIPTNFTISVTTEILPVSMTKTSVDCTMYICGDSTECSNLLLQYGSFCTQLNRALTGIAVEQDKNTQEVFAQVKQIYKTPPIKDFGGFNFSQILPDPSKPSKRSFIEDLLFNKVTLADAGFIKQYGDCLGDIAARDLICAQKFNGLTVLPPLLTDEMIAQYTSALLACTITSGWTCGAGPALQIPFAMQMAYRFNGIGVTQNVLYENQKLIANQFNSAIGKIQDSLSSTPSALGKLQDVVNQNAQALNTLVKQLSSNFGAISSVLNDILSRLDPPEAEVQIDRLITGRLQSLQTYVTQQLIRAAEIRASANLAATKMSECVLGQSKRVDFCGKGYHLMSFPQSAPHGVVFLHVTYVPAQEKNFTTAPAICHDGKAHFPREGVFVSNGTHWFVTQRNFYEPQIITTDNTFVSGNCDVVIGIVNNTVYDPLQPELDSFKEELDKYFKNHTSPDVDLGDISGINASVVNIQKEIDRLNEVAKNLNESLIDLQELGKYEQGSGYIPEAPRDGQAYVRKDGEWVLLSTFLGRSLEVLFQGPGSLPETGGGSDYKDDDDKGGGGSGGGGSGGGGSGGGGSGGGGSHHHHHH

SEQ ID NO: 186 - protein, 1297 aa, Artificial Sequence
  SEQ ID NO:3 + A942P + A892P + D614N + N532P + S884C + A893C
MFVFLVLLPLVSSQCVNLTTRTQLPPAYTNSFTRGVYYPDKVFRSSVLHSTQDLFLPFFSNVTWFHAIHVSGTNGTKRFDNPVLPFNDGVYFASTEKSNIIRGWIFGTTLDSKTQSLLIVNNATNVVIKVCEFQFCNDPFLGVYYHKNNKSWMESEFRVYSSANNCTFEYVSQPFLMDLEGKQGNFKNLREFVFKNIDGYFKIYSKHTPINLVRDLPQGFSALEPLVDLPIGINITRFQTLLALHRSYLTPGDSSSGWTAGAAAYYVGYLQPRTFLLKYNENGTITDAVDCALDPLSETKCTLKSFTVEKGIYQTSNFRVQPTESIVRFPNITNLCPFGEVFNATRFASVYAWNRKRISNCVADYSVLYNSASFSTFKCYGVSPTKLNDLCFTNVYADSFVIRGDEVRQIAPGQTGKIADYNYKLPDDFTGCVIAWNSNNLDSKVGGNYNYLYRLFRKSNLKPFERDISTEIYQAGSTPCNGVEGFNCYFPLQSYGFQPTNGVGYQPYRVVVLSFELLHAPATVCGPKKSTPLVKNKCVNFNFNGLTGTGVLTESNKKFLPFQQFGRDIADTTDAVRDPQTLEILDITPCSFGGVSVITPGTNTSNQVAVLYQNVNCTEVPVAIHADQLTPTWRVYSTGSNVFQTRAGCLIGAEHVNNSYECDIPIGAGICASYQTQTNSPSRAGSVASQSIIAYTMSLGAENSVAYSNNSIAIPTNFTISVTTEILPVSMTKTSVDCTMYICGDSTECSNLLLQYGSFCTQLNRALTGIAVEQDKNTQEVFAQVKQIYKTPPIKDFGGFNFSQILPDPSKPSKRSFIEDLLFNKVTLADAGFIKQYGDCLGDIAARDLICAQKFNGLTVLPPLLTDEMIAQYTSALLAGTITCGWTFGAGPCLQIPFAMQMAYRFNGIGVTQNVLYENQKLIANQFNSAIGKIQDSLSSTPSALGKLQDVVNQNAQALNTLVKQLSSNFGAISSVLNDILSRLDPPEAEVQIDRLITGRLQSLQTYVTQQLIRAAEIRASANLAATKMSECVLGQSKRVDFCGKGYHLMSFPQSAPHGVVFLHVTYVPAQEKNFTTAPAICHDGKAHFPREGVFVSNGTHWFVTQRNFYEPQIITTDNTFVSGNCDVVIGIVNNTVYDPLQPELDSFKEELDKYFKNHTSPDVDLGDISGINASVVNIQKEIDRLNEVAKNLNESLIDLQELGKYEQGSGYIPEAPRDGQAYVRKDGEWVLLSTFLGRSLEVLFQGPGSLPETGGGSDYKDDDDKGGGGSGGGGSGGGGSGGGGSGGGGSHHHHHH

SEQ ID NO: 187 - protein, 1297 aa, Artificial Sequence
  SEQ ID NO:3 + A942P + A892P + T572I + N532P + G880C + F888C
MFVFLVLLPLVSSQCVNLTTRTQLPPAYTNSFTRGVYYPDKVFRSSVLHSTQDLFLPFFSNVTWFHAIHVSGTNGTKRFDNPVLPFNDGVYFASTEKSNIIRGWIFGTTLDSKTQSLLIVNNATNVVIKVCEFQFCNDPFLGVYYHKNNKSWMESEFRVYSSANNCTFEYVSQPFLMDLEGKQGNFKNLREFVFKNIDGYFKIYSKHTPINLVRDLPQGFSALEPLVDLPIGINITRFQTLLALHRSYLTPGDSSSGWTAGAAAYYVGYLQPRTFLLKYNENGTITDAVDCALDPLSETKCTLKSFTVEKGIYQTSNFRVQPTESIVRFPNITNLCPFGEVFNATRFASVYAWNRKRISNCVADYSVLYNSASFSTFKCYGVSPTKLNDLCFTNVYADSFVIRGDEVRQIAPGQTGKIADYNYKLPDDFTGCVIAWNSNNLDSKVGGNYNYLYRLFRKSNLKPFERDISTEIYQAGSTPCNGVEGFNCYFPLQSYGFQPTNGVGYQPYRVVVLSFELLHAPATVCGPKKSTPLVKNKCVNFNFNGLTGTGVLTESNKKFLPFQQFGRDIADITDAVRDPQTLEILDITPCSFGGVSVITPGTNTSNQVAVLYQDVNCTEVPVAIHADQLTPTWRVYSTGSNVFQTRAGCLIGAEHVNNSYECDIPIGAGICASYQTQTNSPSRAGSVASQSIIAYTMSLGAENSVAYSNNSIAIPTNFTISVTTEILPVSMTKTSVDCTMYICGDSTECSNLLLQYGSFCTQLNRALTGIAVEQDKNTQEVFAQVKQIYKTPPIKDFGGFNFSQILPDPSKPSKRSFIEDLLFNKVTLADAGFIKQYGDCLGDIAARDLICAQKFNGLTVLPPLLTDEMIAQYTSALLACTITSGWTCGAGPALQIPFAMQMAYRFNGIGVTQNVLYENQKLIANQFNSAIGKIQDSLSSTPSALGKLQDVVNQNAQALNTLVKQLSSNFGAISSVLNDILSRLDPPEAEVQIDRLITGRLQSLQTYVTQQLIRAAEIRASANLAATKMSECVLGQSKRVDFCGKGYHLMSFPQSAPHGVVFLHVTYVPAQEKNFTTAPAICHDGKAHFPREGVFVSNGTHWFVTQRNFYEPQIITTDNTFVSGNCDVVIGIVNNTVYDPLQPELDSFKEELDKYFKNHTSPDVDLGDISGINASVVNIQKEIDRLNEVAKNLNESLIDLQELGKYEQGSGYIPEAPRDGQAYVRKDGEWVLLSTFLGRSLEVLFQGPGSLPETGGGSDYKDDDDKGGGGSGGGGSGGGGSGGGGSGGGGSHHHHHH

SEQ ID NO: 188 - protein, 1297 aa, Artificial Sequence
  SEQ ID NO:3 + A942P + A892P + T572I + N532P + S884C + A893C
MFVFLVLLPLVSSQCVNLTTRTQLPPAYTNSFTRGVYYPDKVFRSSVLHSTQDLFLPFFSNVTWFHAIHVSGTNGTKRFDNPVLPFNDGVYFASTEKSNIIRGWIFGTTLDSKTQSLLIVNNATNVVIKVCEFQFCNDPFLGVYYHKNNKSWMESEFRVYSSANNCTFEYVSQPFLMDLEGKQGNFKNLREFVFKNIDGYFKIYSKHTPINLVRDLPQGFSALEPLVDLPIGINITRFQTLLALHRSYLTPGDSSSGWTAGAAAYYVGYLQPRTFLLKYNENGTITDAVDCALDPLSETKCTLKSFTVEKGIYQTSNFRVQPTESIVRFPNITNLCPFGEVFNATRFASVYAWNRKRISNCVADYSVLYNSASFSTFKCYGVSPTKLNDLCFTNVYADSFVIRGDEVRQIAPGQTGKIADYNYKLPDDFTGCVIAWNSNNLDSKVGGNYNYLYRLFRKSNLKPFERDISTEIYQAGSTPCNGVEGFNCYFPLQSYGFQPTNGVGYQPYRVVVLSFELLHAPATVCGPKKSTPLVKNKCVNFNFNGLTGTGVLTESNKKFLPFQQFGRDIADITDAVRDPQTLEILDITPCSFGGVSVITPGTNTSNQVAVLYQDVNCTEVPVAIHADQLTPTWRVYSTGSNVFQTRAGCLIGAEHVNNSYECDIPIGAGICASYQTQTNSPSRAGSVASQSIIAYTMSLGAENSVAYSNNSIAIPTNFTISVTTEILPVSMTKTSVDCTMYICGDSTECSNLLLQYGSFCTQLNRALTGIAVEQDKNTQEVFAQVKQIYKTPPIKDFGGFNFSQILPDPSKPSKRSFIEDLLFNKVTLADAGFIKQYGDCLGDIAARDLICAQKFNGLTVLPPLLTDEMIAQYTSALLAGTITCGWTFGAGPCLQIPFAMQMAYRFNGIGVTQNVLYENQKLIANQFNSAIGKIQDSLSSTPSALGKLQDVVNQNAQALNTLVKQLSSNFGAISSVLNDILSRLDPPEAEVQIDRLITGRLQSLQTYVTQQLIRAAEIRASANLAATKMSECVLGQSKRVDFCGKGYHLMSFPQSAPHGVVFLHVTYVPAQEKNFTTAPAICHDGKAHFPREGVFVSNGTHWFVTQRNFYEPQIITTDNTFVSGNCDVVIGIVNNTVYDPLQPELDSFKEELDKYFKNHTSPDVDLGDISGINASVVNIQKEIDRLNEVAKNLNESLIDLQELGKYEQGSGYIPEAPRDGQAYVRKDGEWVLLSTFLGRSLEVLFQGPGSLPETGGGSDYKDDDDKGGGGSGGGGSGGGGSGGGGSGGGGSHHHHHH

SEQ ID NO: 189 - protein, 1297 aa, Artificial Sequence
  SEQ ID NO:3 + A942P + D614N + T572I + N532P + G880C + F888C
MFVFLVLLPLVSSQCVNLTTRTQLPPAYTNSFTRGVYYPDKVFRSSVLHSTQDLFLPFFSNVTWFHAIHVSGTNGTKRFDNPVLPFNDGVYFASTEKSNIIRGWIFGTTLDSKTQSLLIVNNATNVVIKVCEFQFCNDPFLGVYYHKNNKSWMESEFRVYSSANNCTFEYVSQPFLMDLEGKQGNFKNLREFVFKNIDGYFKIYSKHTPINLVRDLPQGFSALEPLVDLPIGINITRFQTLLALHRSYLTPGDSSSGWTAGAAAYYVGYLQPRTFLLKYNENGTITDAVDCALDPLSETKCTLKSFTVEKGIYQTSNFRVQPTESIVRFPNITNLCPFGEVFNATRFASVYAWNRKRISNCVADYSVLYNSASFSTFKCYGVSPTKLNDLCFTNVYADSFVIRGDEVRQIAPGQTGKIADYNYKLPDDFTGCVIAWNSNNLDSKVGGNYNYLYRLFRKSNLKPFERDISTEIYQAGSTPCNGVEGFNCYFPLQSYGFQPTNGVGYQPYRVVVLSFELLHAPATVCGPKKSTPLVKNKCVNFNFNGLTGTGVLTESNKKFLPFQQFGRDIADITDAVRDPQTLEILDITPCSFGGVSVITPGTNTSNQVAVLYQNVNCTEVPVAIHADQLTPTWRVYSTGSNVFQTRAGCLIGAEHVNNSYECDIPIGAGICASYQTQTNSPSRAGSVASQSIIAYTMSLGAENSVAYSNNSIAIPTNFTISVTTEILPVSMTKTSVDCTMYICGDSTECSNLLLQYGSFCTQLNRALTGIAVEQDKNTQEVFAQVKQIYKTPPIKDFGGFNFSQILPDPSKPSKRSFIEDLLFNKVTLADAGFIKQYGDCLGDIAARDLICAQKFNGLTVLPPLLTDEMIAQYTSALLACTITSGWTCGAGAALQIPFAMQMAYRFNGIGVTQNVLYENQKLIANQFNSAIGKIQDSLSSTPSALGKLQDVVNQNAQALNTLVKQLSSNFGAISSVLNDILSRLDPPEAEVQIDRLITGRLQSLQTYVTQQLIRAAEIRASANLAATKMSECVLGQSKRVDFCGKGYHLMSFPQSAPHGVVFLHVTYVPAQEKNFTTAPAICHDGKAHFPREGVFVSNGTHWFVTQRNFYEPQIITTDNTFVSGNCDVVIGIVNNTVYDPLQPELDSFKEELDKYFKNHTSPDVDLGDISGINASVVNIQKEIDRLNEVAKNLNESLIDLQELGKYEQGSGYIPEAPRDGQAYVRKDGEWVLLSTFLGRSLEVLFQGPGSLPETGGGSDYKDDDDKGGGGSGGGGSGGGGSGGGGSGGGGSHHHHHH

SEQ ID NO: 190 - protein, 1297 aa, Artificial Sequence
  SEQ ID NO:3 + A942P + D614N + T572I + N532P + S884C + A893C
MFVFLVLLPLVSSQCVNLTTRTQLPPAYTNSFTRGVYYPDKVFRSSVLHSTQDLFLPFFSNVTWFHAIHVSGTNGTKRFDNPVLPFNDGVYFASTEKSNIIRGWIFGTTLDSKTQSLLIVNNATNVVIKVCEFQFCNDPFLGVYYHKNNKSWMESEFRVYSSANNCTFEYVSQPFLMDLEGKQGNFKNLREFVFKNIDGYFKIYSKHTPINLVRDLPQGFSALEPLVDLPIGINITRFQTLLALHRSYLTPGDSSSGWTAGAAAYYVGYLQPRTFLLKYNENGTITDAVDCALDPLSETKCTLKSFTVEKGIYQTSNFRVQPTESIVRFPNITNLCPFGEVFNATRFASVYAWNRKRISNCVADYSVLYNSASFSTFKCYGVSPTKLNDLCFTNVYADSFVIRGDEVRQIAPGQTGKIADYNYKLPDDFTGCVIAWNSNNLDSKVGGNYNYLYRLFRKSNLKPFERDISTEIYQAGSTPCNGVEGFNCYFPLQSYGFQPTNGVGYQPYRVVVLSFELLHAPATVCGPKKSTPLVKNKCVNFNFNGLTGTGVLTESNKKFLPFQQFGRDIADITDAVRDPQTLEILDITPCSFGGVSVITPGTNTSNQVAVLYQNVNCTEVPVAIHADQLTPTWRVYSTGSNVFQTRAGCLIGAEHVNNSYECDIPIGAGICASYQTQTNSPSRAGSVASQSIIAYTMSLGAENSVAYSNNSIAIPTNFTISVTTEILPVSMTKTSVDCTMYICGDSTECSNLLLQYGSFCTQLNRALTGIAVEQDKNTQEVFAQVKQIYKTPPIKDFGGFNFSQILPDPSKPSKRSFIEDLLFNKVTLADAGFIKQYGDCLGDIAARDLICAQKFNGLTVLPPLLTDEMIAQYTSALLAGTITCGWTFGAGACLQIPFAMQMAYRFNGIGVTQNVLYENQKLIANQFNSAIGKIQDSLSSTPSALGKLQDVVNQNAQALNTLVKQLSSNFGAISSVLNDILSRLDPPEAEVQIDRLITGRLQSLQTYVTQQLIRAAEIRASANLAATKMSECVLGQSKRVDFCGKGYHLMSFPQSAPHGVVFLHVTYVPAQEKNFTTAPAICHDGKAHFPREGVFVSNGTHWFVTQRNFYEPQIITTDNTFVSGNCDVVIGIVNNTVYDPLQPELDSFKEELDKYFKNHTSPDVDLGDISGINASVVNIQKEIDRLNEVAKNLNESLIDLQELGKYEQGSGYIPEAPRDGQAYVRKDGEWVLLSTFLGRSLEVLFQGPGSLPETGGGSDYKDDDDKGGGGSGGGGSGGGGSGGGGSGGGGSHHHHHH

SEQ ID NO: 191 - protein, 1297 aa, Artificial Sequence
  SEQ ID NO:3 + A892P + D614N + T572I + N532P + G880C + F888C
MFVFLVLLPLVSSQCVNLTTRTQLPPAYTNSFTRGVYYPDKVFRSSVLHSTQDLFLPFFSNVTWFHAIHVSGTNGTKRFDNPVLPFNDGVYFASTEKSNIIRGWIFGTTLDSKTQSLLIVNNATNVVIKVCEFQFCNDPFLGVYYHKNNKSWMESEFRVYSSANNCTFEYVSQPFLMDLEGKQGNFKNLREFVFKNIDGYFKIYSKHTPINLVRDLPQGFSALEPLVDLPIGINITRFQTLLALHRSYLTPGDSSSGWTAGAAAYYVGYLQPRTFLLKYNENGTITDAVDCALDPLSETKCTLKSFTVEKGIYQTSNFRVQPTESIVRFPNITNLCPFGEVFNATRFASVYAWNRKRISNCVADYSVLYNSASFSTFKCYGVSPTKLNDLCFTNVYADSFVIRGDEVRQIAPGQTGKIADYNYKLPDDFTGCVIAWNSNNLDSKVGGNYNYLYRLFRKSNLKPFERDISTEIYQAGSTPCNGVEGFNCYFPLQSYGFQPTNGVGYQPYRVVVLSFELLHAPATVCGPKKSTPLVKNKCVNFNFNGLTGTGVLTESNKKFLPFQQFGRDIADITDAVRDPQTLEILDITPCSFGGVSVITPGTNTSNQVAVLYQNVNCTEVPVAIHADQLTPTWRVYSTGSNVFQTRAGCLIGAEHVNNSYECDIPIGAGICASYQTQTNSPSRAGSVASQSIIAYTMSLGAENSVAYSNNSIAIPTNFTISVTTEILPVSMTKTSVDCTMYICGDSTECSNLLLQYGSFCTQLNRALTGIAVEQDKNTQEVFAQVKQIYKTPPIKDFGGFNFSQILPDPSKPSKRSFIEDLLFNKVTLADAGFIKQYGDCLGDIAARDLICAQKFNGLTVLPPLLTDEMIAQYTSALLACTITSGWTCGAGPALQIPFAMQMAYRFNGIGVTQNVLYENQKLIANQFNSAIGKIQDSLSSTASALGKLQDVVNQNAQALNTLVKQLSSNFGAISSVLNDILSRLDPPEAEVQIDRLITGRLQSLQTYVTQQLIRAAEIRASANLAATKMSECVLGQSKRVDFCGKGYHLMSFPQSAPHGVVFLHVTYVPAQEKNFTTAPAICHDGKAHFPREGVFVSNGTHWFVTQRNFYEPQIITTDNTFVSGNCDVVIGIVNNTVYDPLQPELDSFKEELDKYFKNHTSPDVDLGDISGINASVVNIQKEIDRLNEVAKNLNESLIDLQELGKYEQGSGYIPEAPRDGQAYVRKDGEWVLLSTFLGRSLEVLFQGPGSLPETGGGSDYKDDDDKGGGGSGGGGSGGGGSGGGGSGGGGSHHHHHH

SEQ ID NO: 192 - protein, 1297 aa, Artificial Sequence
  SEQ ID NO:3 + A892P + D614N + T572I + N532P + S884C + A893C
MFVFLVLLPLVSSQCVNLTTRTQLPPAYTNSFTRGVYYPDKVFRSSVLHSTQDLFLPFFSNVTWFHAIHVSGTNGTKRFDNPVLPFNDGVYFASTEKSNIIRGWIFGTTLDSKTQSLLIVNNATNVVIKVCEFQFCNDPFLGVYYHKNNKSWMESEFRVYSSANNCTFEYVSQPFLMDLEGKQGNFKNLREFVFKNIDGYFKIYSKHTPINLVRDLPQGFSALEPLVDLPIGINITRFQTLLALHRSYLTPGDSSSGWTAGAAAYYVGYLQPRTFLLKYNENGTITDAVDCALDPLSETKCTLKSFTVEKGIYQTSNFRVQPTESIVRFPNITNLCPFGEVFNATRFASVYAWNRKRISNCVADYSVLYNSASFSTFKCYGVSPTKLNDLCFTNVYADSFVIRGDEVRQIAPGQTGKIADYNYKLPDDFTGCVIAWNSNNLDSKVGGNYNYLYRLFRKSNLKPFERDISTEIYQAGSTPCNGVEGFNCYFPLQSYGFQPTNGVGYQPYRVVVLSFELLHAPATVCGPKKSTPLVKNKCVNFNFNGLTGTGVLTESNKKFLPFQQFGRDIADITDAVRDPQTLEILDITPCSFGGVSVITPGTNTSNQVAVLYQNVNCTEVPVAIHADQLTPTWRVYSTGSNVFQTRAGCLIGAEHVNNSYECDIPIGAGICASYQTQTNSPSRAGSVASQSIIAYTMSLGAENSVAYSNNSIAIPTNFTISVTTEILPVSMTKTSVDCTMYICGDSTECSNLLLQYGSFCTQLNRALTGIAVEQDKNTQEVFAQVKQIYKTPPIKDFGGFNFSQILPDPSKPSKRSFIEDLLFNKVTLADAGFIKQYGDCLGDIAARDLICAQKFNGLTVLPPLLTDEMIAQYTSALLAGTITCGWTFGAGPCLQIPFAMQMAYRFNGIGVTQNVLYENQKLIANQFNSAIGKIQDSLSSTASALGKLQDVVNQNAQALNTLVKQLSSNFGAISSVLNDILSRLDPPEAEVQIDRLITGRLQSLQTYVTQQLIRAAEIRASANLAATKMSECVLGQSKRVDFCGKGYHLMSFPQSAPHGVVFLHVTYVPAQEKNFTTAPAICHDGKAHFPREGVFVSNGTHWFVTQRNFYEPQIITTDNTFVSGNCDVVIGIVNNTVYDPLQPELDSFKEELDKYFKNHTSPDVDLGDISGINASVVNIQKEIDRLNEVAKNLNESLIDLQELGKYEQGSGYIPEAPRDGQAYVRKDGEWVLLSTFLGRSLEVLFQGPGSLPETGGGSDYKDDDDKGGGGSGGGGSGGGGSGGGGSGGGGSHHHHHH

SEQ ID NO: 193 - protein, 1297 aa, Artificial Sequence
  SEQ ID NO:3 + A942P + A892P + D614N + T572I + N532P + G880C + F888C
MFVFLVLLPLVSSQCVNLTTRTQLPPAYTNSFTRGVYYPDKVFRSSVLHSTQDLFLPFFSNVTWFHAIHVSGTNGTKRFDNPVLPFNDGVYFASTEKSNIIRGWIFGTTLDSKTQSLLIVNNATNVVIKVCEFQFCNDPFLGVYYHKNNKSWMESEFRVYSSANNCTFEYVSQPFLMDLEGKQGNFKNLREFVFKNIDGYFKIYSKHTPINLVRDLPQGFSALEPLVDLPIGINITRFQTLLALHRSYLTPGDSSSGWTAGAAAYYVGYLQPRTFLLKYNENGTITDAVDCALDPLSETKCTLKSFTVEKGIYQTSNFRVQPTESIVRFPNITNLCPFGEVFNATRFASVYAWNRKRISNCVADYSVLYNSASFSTFKCYGVSPTKLNDLCFTNVYADSFVIRGDEVRQIAPGQTGKIADYNYKLPDDFTGCVIAWNSNNLDSKVGGNYNYLYRLFRKSNLKPFERDISTEIYQAGSTPCNGVEGFNCYFPLQSYGFQPTNGVGYQPYRVVVLSFELLHAPATVCGPKKSTPLVKNKCVNFNFNGLTGTGVLTESNKKFLPFQQFGRDIADITDAVRDPQTLEILDITPCSFGGVSVITPGTNTSNQVAVLYQNVNCTEVPVAIHADQLTPTWRVYSTGSNVFQTRAGCLIGAEHVNNSYECDIPIGAGICASYQTQTNSPSRAGSVASQSIIAYTMSLGAENSVAYSNNSIAIPTNFTISVTTEILPVSMTKTSVDCTMYICGDSTECSNLLLQYGSFCTQLNRALTGIAVEQDKNTQEVFAQVKQIYKTPPIKDFGGFNFSQILPDPSKPSKRSFIEDLLFNKVTLADAGFIKQYGDCLGDIAARDLICAQKFNGLTVLPPLLTDEMIAQYTSALLACTITSGWTCGAGPALQIPFAMQMAYRFNGIGVTQNVLYENQKLIANQFNSAIGKIQDSLSSTPSALGKLQDVVNQNAQALNTLVKQLSSNFGAISSVLNDILSRLDPPEAEVQIDRLITGRLQSLQTYVTQQLIRAAEIRASANLAATKMSECVLGQSKRVDFCGKGYHLMSFPQSAPHGVVFLHVTYVPAQEKNFTTAPAICHDGKAHFPREGVFVSNGTHWFVTQRNFYEPQIITTDNTFVSGNCDVVIGIVNNTVYDPLQPELDSFKEELDKYFKNHTSPDVDLGDISGINASVVNIQKEIDRLNEVAKNLNESLIDLQELGKYEQGSGYIPEAPRDGQAYVRKDGEWVLLSTFLGRSLEVLFQGPGSLPETGGGSDYKDDDDKGGGGSGGGGSGGGGSGGGGSGGGGSHHHHHH

SEQ ID NO: 194 - protein, 1297 aa, Artificial Sequence
  SEQ ID NO:3 + A942P + A892P + D614N + T572I + N532P + S884C + A893C
MFVFLVLLPLVSSQCVNLTTRTQLPPAYTNSFTRGVYYPDKVFRSSVLHSTQDLFLPFFSNVTWFHAIHVSGTNGTKRFDNPVLPFNDGVYFASTEKSNIIRGWIFGTTLDSKTQSLLIVNNATNVVIKVCEFQFCNDPFLGVYYHKNNKSWMESEFRVYSSANNCTFEYVSQPFLMDLEGKQGNFKNLREFVFKNIDGYFKIYSKHTPINLVRDLPQGFSALEPLVDLPIGINITRFQTLLALHRSYLTPGDSSSGWTAGAAAYYVGYLQPRTFLLKYNENGTITDAVDCALDPLSETKCTLKSFTVEKGIYQTSNFRVQPTESIVRFPNITNLCPFGEVFNATRFASVYAWNRKRISNCVADYSVLYNSASFSTFKCYGVSPTKLNDLCFTNVYADSFVIRGDEVRQIAPGQTGKIADYNYKLPDDFTGCVIAWNSNNLDSKVGGNYNYLYRLFRKSNLKPFERDISTEIYQAGSTPCNGVEGFNCYFPLQSYGFQPTNGVGYQPYRVVVLSFELLHAPATVCGPKKSTPLVKNKCVNFNFNGLTGTGVLTESNKKFLPFQQFGRDIADITDAVRDPQTLEILDITPCSFGGVSVITPGTNTSNQVAVLYQNVNCTEVPVAIHADQLTPTWRVYSTGSNVFQTRAGCLIGAEHVNNSYECDIPIGAGICASYQTQTNSPSRAGSVASQSIIAYTMSLGAENSVAYSNNSIAIPTNFTISVTTEILPVSMTKTSVDCTMYICGDSTECSNLLLQYGSFCTQLNRALTGIAVEQDKNTQEVFAQVKQIYKTPPIKDFGGFNFSQILPDPSKPSKRSFIEDLLFNKVTLADAGFIKQYGDCLGDIAARDLICAQKFNGLTVLPPLLTDEMIAQYTSALLAGTITCGWTFGAGPCLQIPFAMQMAYRFNGIGVTQNVLYENQKLIANQFNSAIGKIQDSLSSTPSALGKLQDVVNQNAQALNTLVKQLSSNFGAISSVLNDILSRLDPPEAEVQIDRLITGRLQSLQTYVTQQLIRAAEIRASANLAATKMSECVLGQSKRVDFCGKGYHLMSFPQSAPHGVVFLHVTYVPAQEKNFTTAPAICHDGKAHFPREGVFVSNGTHWFVTQRNFYEPQIITTDNTFVSGNCDVVIGIVNNTVYDPLQPELDSFKEELDKYFKNHTSPDVDLGDISGINASVVNIQKEIDRLNEVAKNLNESLIDLQELGKYEQGSGYIPEAPRDGQAYVRKDGEWVLLSTFLGRSLEVLFQGPGSLPETGGGSDYKDDDDKGGGGSGGGGSGGGGSGGGGSGGGGSHHHHHH

SEQ ID NO: 195 - DNA, 39 bp, Artificial Sequence
  Signal peptide
atgttcgtgtttctggtgctgctgcctctggtgtccagc

SEQ ID NO: 196 - DNA, 24 bp, Artificial Sequence
  26S promoter
ctctctacggctaacctgaatgga

SEQ ID NO: 197 - DNA, 18 bp, Artificial Sequence
  T7 promoter
taatacgactcactatag

SEQ ID NO: 198 - DNA, 44 bp, Artificial Sequence
  5'-UTR
ataggcggcgcatgagagaagcccagaccaattacctacccaaa

SEQ ID NO: 199 - DNA, 195 bp, Artificial Sequence
  Alpha 5'-replication sequence from nsP1
taggagaaagttcacgttgacatcgaggaagacagcccattcctcagagctttgcagcggagcttcccgcagtttgaggtagaagccaagcaggtcactgataatgaccatgctaatgccagagcgttttcgcatctggcttcaaaactgatcgaaacggaggtggacccatccgacacgatccttgacattgga

SEQ ID NO: 200 - DNA, 142 bp, Artificial Sequence
  gDLP
atagtcagcatagtacatttcatctgactaatactacaacaccaccaccatgaatagaggattctttaacatgctcggccgccgccccttcccggcccccactgccatgtggaggccgcggagaaggaggcaggcggccccg

SEQ ID NO: 201 - DNA, 66 bp, Artificial Sequence
  P2A autoprotease sequence
ggaagcggagctactaacttcagcctgctgaagcaggctggagacgtggaggagaaccctggacct

SEQ ID NO: 202 - protein, 22 aa, Artificial Sequence
  P2A autoprotease sequence
GSGATNFSLLKQAGDVEENPGP

SEQ ID NO: 203 - DNA, 5796 bp, Artificial Sequence
  DLP nsp ORF encoding a 3' portion of gDLP, P2A, and nsp1-3
atgaatagaggattctttaacatgctcggccgccgccccttcccggcccccactgccatgtggaggccgcggagaaggaggcaggcggccccgggaagcggagctactaacttcagcctgctgaagcaggctggagacgtggaggagaaccctggacctgagaaagttcacgttgacatcgaggaagacagcccattcctcagagctttgcagcggagcttcccgcagtttgaggtagaagccaagcaggtcactgataatgaccatgctaatgccagagcgttttcgcatctggcttcaaaactgatcgaaacggaggtggacccatccgacacgatccttgacattggaagtgcgcccgcccgcagaatgtattctaagcacaagtatcattgtatctgtccgatgagatgtgcggaagatccggacagattgtataagtatgcaactaagctgaagaaaaactgtaaggaaataactgataaggaattggacaagaaaatgaaggagctcgccgccgtcatgagcgaccctgacctggaaactgagactatgtgcctccacgacgacgagtcgtgtcgctacgaagggcaagtcgctgtttaccaggatgtatacgcggttgacggaccgacaagtctctatcaccaagccaataagggagttagagtcgcctactggataggctttgacaccaccccttttatgtttaagaacttggctggagcatatccatcatactctaccaactgggccgacgaaaccgtgttaacggctcgtaacataggcctatgcagctctgacgttatggagcggtcacgtagagggatgtccattcttagaaagaagtatttgaaaccatccaacaatgttctattctctgttggctcgaccatctaccacgagaagagggacttactgaggagctggcacctgccgtctgtatttcacttacgtggcaagcaaaattacacatgtcggtgtgagactatagttagttgcgacgggtacgtcgttaaaagaatagctatcagtccaggcctgtatgggaagccttcaggctatgctgctacgatgcaccgcgagggattcttgtgctgcaaagtgacagacacattgaacggggagagggtctcttttcccgtgtgcacgtatgtgccagctacattgtgtgaccaaatgactggcatactggcaacagatgtcagtgcggacgacgcgcaaaaactgctggttgggctcaaccagcgtatagtcgtcaacggtcgcacccagagaaacaccaataccatgaaaaattaccttttgcccgtagtggcccaggcatttgctaggtgggcaaaggaatataaggaagatcaagaagatgaaaggccactaggactacgagatagacagttagtcatggggtgttgttgggcttttagaaggcacaagataacatctatttataagcgcccggatacccaaaccatcatcaaagtgaacagcgatttccactcattcgtgctgcccaggataggcagtaacacattggagatcgggctgagaacaagaatcaggaaaatgttagaggagcacaaggagccgtcacctctcattaccgccgaggacgtacaagaagctaagtgcgcagccgatgaggctaaggaggtgcgtgaagccgaggagttgcgcgcagctctaccacctttggcagctgatgttgaggagcccactctggaagccgatgtcgacttgatgttacaagaggctggggccggctcagtggagacacctcgtggcttgataaaggttaccagctacgatggcgaggacaagatcggctcttacgctgtgctttctccgcaggctgtactcaagagtgaaaaattatcttgcatccaccctctcgctgaacaagtcatagtgataacacactctggccgaaaagggcgttatgccgtggaaccataccatggtaaagtagtggtgccagagggacatgcaatacccgtccaggactttcaagctctgagtgaaagtgccaccattgtgtacaacgaacgtgagttcgtaaacaggtacctgcaccatattgccacacatggaggagcgctgaacactgatgaagaatattacaaaactgtcaagcccagcgagcacgacggcgaatacctgtacgacatcgacaggaaacagtgcgtcaagaaagaactagtcactgggctagggctcacaggcgagctggtggatcctcccttccatgaattcgcctacgagagtctgagaacacgaccagccgctccttaccaagtaccaaccataggggtgtatggcgtgccaggatcaggcaagtctggcatcattaaaagcgcagtcaccaaaaaagatctagtggtgagcgccaagaaagaaaactgtgcagaaattataagggacgtcaagaaaatgaaagggctggacgtcaatgccagaactgtggactcagtgctcttgaatggatgcaaacaccccgtagagaccctgtatattgacgaagcttttgcttgtcatgcaggtactctcagagcgctcatagccattataagacctaaaaaggcagtgctctgcggggatcccaaacagtgcggtttttttaacatgatgtgcctgaaagtgcattttaaccacgagatttgcacacaagtcttccacaaaagcatctctcgccgttgcactaaatctgtgacttcggtcgtctcaaccttgttttacgacaaaaaaatgagaacgacgaatccgaaagagactaagattgtgattgacactaccggcagtaccaaacctaagcaggacgatctcattctcacttgtttcagagggtgggtgaagcagttgcaaatagattacaaaggcaacgaaataatgacggcagctgcctctcaagggctgacccgtaaaggtgtgtatgccgttcggtacaaggtgaatgaaaatcctctgtacgcacccacctctgaacatgtgaacgtcctactgacccgcacggaggaccgcatcgtgtggaaaacactagccggcgacccatggataaaaacactgactgccaagtaccctgggaatttcactgccacgatagaggagtggcaagcagagcatgatgccatcatgaggcacatcttggagagaccggaccctaccgacgtcttccagaataaggcaaacgtgtgttgggccaaggctttagtgccggtgctgaagaccgctggcatagacatgaccactgaacaatggaacactgtggattattttgaaacggacaaagctcactcagcagagatagtattgaaccaactatgcgtgaggttctttggactcgatctggactccggtctattttctgcacccactgttccgttatccattaggaataatcactgggataactccccgtcgcctaacatgtacgggctgaataaagaagtggtccgtcagctctctcgcaggtacccacaactgcctcgggcagttgccactggaagagtctatgacatgaacactggtacactgcgcaattatgatccgcgcataaacctagtacctgtaaacagaagactgcctcatgctttagtcctccaccataatgaacacccacagagtgacttttcttcattcgtcagcaaattgaagggcagaactgtcctggtggtcggggaaaagttgtccgtcccaggcaaaatggttgactggttgtcagaccggcctgaggctaccttcagagctcggctggatttaggcatcccaggtgatgtgcccaaatatgacataatatttgttaatgtgaggaccccatataaataccatcactatcagcagtgtgaagaccatgccattaagcttagcatgttgaccaagaaagcttgtctgcatctgaatcccggcggaacctgtgtcagcataggttatggttacgctgacagggccagcgaaagcatcattggtgctatagcgcggcagttcaagttttcccgggtatgcaaaccgaaatcctcacttgaagagacggaagttctgtttgtattcattgggtacgatcgcaaggcccgtacgcacaatccttacaagctttcatcaaccttgaccaacatttatacaggttccagactccacgaagccggatgtgcaccctcatatcatgtggtgcgaggggatattgccacggccaccgaaggagtgattataaatgctgctaacagcaaaggacaacctggcggaggggtgtgcggagcgctgtataagaaattcccggaaagcttcgatttacagccgatcgaagtaggaaaagcgcgactggtcaaaggtgcagctaaacatatcattcatgccgtaggaccaaacttcaacaaagtttcggaggttgaaggtgacaaacagttggcagaggcttatgagtccatcgctaagattgtcaacgataacaattacaagtcagtagcgattccactgttgtccaccggcatcttttccgggaacaaagatcgactaacccaatcattgaaccatttgctgacagctttagacaccactgatgcagatgtagccatatactgcagggacaagaaatgggaaatgactctcaaggaagcagtggctaggagagaagcagtggaggagatatgcatatccgacgactcttcagtgacagaacctgatgcagagctggtgagggtgcatccgaagagttctttggctggaaggaagggctacagcacaagcgatggcaaaactttctcatatttggaagggaccaagtttcaccaggcggccaaggatatagcagaaattaatgccatgtggcccgttgcaacggaggccaatgagcaggtatgcatgtatatcctcggagaaagcatgagcagtattaggtcgaaatgccccgtcgaagagtcggaagcctccacaccacctagcacgctgccttgcttgtgcatccatgccatgactccagaaagagtacagcgcctaaaagcctcacgtccagaacaaattactgtgtgctcatcctttccattgccgaagtatagaatcactggtgtgcagaagatccaatgctcccagcctatattgttctcaccgaaagtgcctgcgtatattcatccaaggaagtatctcgtggaaacaccaccggtagacgagactccggagccatcggcagagaaccaatccacagaggggacacctgaacaaccaccacttataaccgaggatgagaccaggactagaacgcctgagccgatcatcatcgaagaggaagaagaggatagcataagtttgctgtcagatggcccgacccaccaggtgctgcaagtcgaggcagacattcacgggccgccctctgtatctagctcatcctggtccattcctcatgcatccgactttgatgtggacagtttatccatacttgacaccctggagggagctagcgtgaccagcggggcaacgtcagccgagactaactcttacttcgcaaagagtatggagtttctggcgcgaccggtgcctgcgcctcgaacagtattcaggaaccctccacatcccgctccgcgcacaagaacaccgtcacttgcacccagcagggcctgctcgagaaccagcctagtttccaccccgccaggcgtgaatagggtgatcactagagaggagctcgaggcgcttaccccgtcacgcactcctagcaggtcggtctcgagaaccagcctggtctccaacccgccaggcgtaaatagggtgattacaagagaggagtttgaggcgttcgtagcacaacaacaatga

SEQ ID NO: 204 - DNA, 1602 bp, Artificial Sequence
  nsp1
gagaaagttcacgttgacatcgaggaagacagcccattcctcagagctttgcagcggagcttcccgcagtttgaggtagaagccaagcaggtcactgataatgaccatgctaatgccagagcgttttcgcatctggcttcaaaactgatcgaaacggaggtggacccatccgacacgatccttgacattggaagtgcgcccgcccgcagaatgtattctaagcacaagtatcattgtatctgtccgatgagatgtgcggaagatccggacagattgtataagtatgcaactaagctgaagaaaaactgtaaggaaataactgataaggaattggacaagaaaatgaaggagctcgccgccgtcatgagcgaccctgacctggaaactgagactatgtgcctccacgacgacgagtcgtgtcgctacgaagggcaagtcgctgtttaccaggatgtatacgcggttgacggaccgacaagtctctatcaccaagccaataagggagttagagtcgcctactggataggctttgacaccaccccttttatgtttaagaacttggctggagcatatccatcatactctaccaactgggccgacgaaaccgtgttaacggctcgtaacataggcctatgcagctctgacgttatggagcggtcacgtagagggatgtccattcttagaaagaagtatttgaaaccatccaacaatgttctattctctgttggctcgaccatctaccacgagaagagggacttactgaggagctggcacctgccgtctgtatttcacttacgtggcaagcaaaattacacatgtcggtgtgagactatagttagttgcgacgggtacgtcgttaaaagaatagctatcagtccaggcctgtatgggaagccttcaggctatgctgctacgatgcaccgcgagggattcttgtgctgcaaagtgacagacacattgaacggggagagggtctcttttcccgtgtgcacgtatgtgccagctacattgtgtgaccaaatgactggcatactggcaacagatgtcagtgcggacgacgcgcaaaaactgctggttgggctcaaccagcgtatagtcgtcaacggtcgcacccagagaaacaccaataccatgaaaaattaccttttgcccgtagtggcccaggcatttgctaggtgggcaaaggaatataaggaagatcaagaagatgaaaggccactaggactacgagatagacagttagtcatggggtgttgttgggcttttagaaggcacaagataacatctatttataagcgcccggatacccaaaccatcatcaaagtgaacagcgatttccactcattcgtgctgcccaggataggcagtaacacattggagatcgggctgagaacaagaatcaggaaaatgttagaggagcacaaggagccgtcacctctcattaccgccgaggacgtacaagaagctaagtgcgcagccgatgaggctaaggaggtgcgtgaagccgaggagttgcgcgcagctctaccacctttggcagctgatgttgaggagcccactctggaagccgatgtcgacttgatgttacaagaggctggggcc

SEQ ID NO: 205 - DNA, 2382 bp, Artificial Sequence
  nsp2
ggctcagtggagacacctcgtggcttgataaaggttaccagctacgatggcgaggacaagatcggctcttacgctgtgctttctccgcaggctgtactcaagagtgaaaaattatcttgcatccaccctctcgctgaacaagtcatagtgataacacactctggccgaaaagggcgttatgccgtggaaccataccatggtaaagtagtggtgccagagggacatgcaatacccgtccaggactttcaagctctgagtgaaagtgccaccattgtgtacaacgaacgtgagttcgtaaacaggtacctgcaccatattgccacacatggaggagcgctgaacactgatgaagaatattacaaaactgtcaagcccagcgagcacgacggcgaatacctgtacgacatcgacaggaaacagtgcgtcaagaaagaactagtcactgggctagggctcacaggcgagctggtggatcctcccttccatgaattcgcctacgagagtctgagaacacgaccagccgctccttaccaagtaccaaccataggggtgtatggcgtgccaggatcaggcaagtctggcatcattaaaagcgcagtcaccaaaaaagatctagtggtgagcgccaagaaagaaaactgtgcagaaattataagggacgtcaagaaaatgaaagggctggacgtcaatgccagaactgtggactcagtgctcttgaatggatgcaaacaccccgtagagaccctgtatattgacgaagcttttgcttgtcatgcaggtactctcagagcgctcatagccattataagacctaaaaaggcagtgctctgcggggatcccaaacagtgcggtttttttaacatgatgtgcctgaaagtgcattttaaccacgagatttgcacacaagtcttccacaaaagcatctctcgccgttgcactaaatctgtgacttcggtcgtctcaaccttgttttacgacaaaaaaatgagaacgacgaatccgaaagagactaagattgtgattgacactaccggcagtaccaaacctaagcaggacgatctcattctcacttgtttcagagggtgggtgaagcagttgcaaatagattacaaaggcaacgaaataatgacggcagctgcctctcaagggctgacccgtaaaggtgtgtatgccgttcggtacaaggtgaatgaaaatcctctgtacgcacccacctctgaacatgtgaacgtcctactgacccgcacggaggaccgcatcgtgtggaaaacactagccggcgacccatggataaaaacactgactgccaagtaccctgggaatttcactgccacgatagaggagtggcaagcagagcatgatgccatcatgaggcacatcttggagagaccggaccctaccgacgtcttccagaataaggcaaacgtgtgttgggccaaggctttagtgccggtgctgaagaccgctggcatagacatgaccactgaacaatggaacactgtggattattttgaaacggacaaagctcactcagcagagatagtattgaaccaactatgcgtgaggttctttggactcgatctggactccggtctattttctgcacccactgttccgttatccattaggaataatcactgggataactccccgtcgcctaacatgtacgggctgaataaagaagtggtccgtcagctctctcgcaggtacccacaactgcctcgggcagttgccactggaagagtctatgacatgaacactggtacactgcgcaattatgatccgcgcataaacctagtacctgtaaacagaagactgcctcatgctttagtcctccaccataatgaacacccacagagtgacttttcttcattcgtcagcaaattgaagggcagaactgtcctggtggtcggggaaaagttgtccgtcccaggcaaaatggttgactggttgtcagaccggcctgaggctaccttcagagctcggctggatttaggcatcccaggtgatgtgcccaaatatgacataatatttgttaatgtgaggaccccatataaataccatcactatcagcagtgtgaagaccatgccattaagcttagcatgttgaccaagaaagcttgtctgcatctgaatcccggcggaacctgtgtcagcataggttatggttacgctgacagggccagcgaaagcatcattggtgctatagcgcggcagttcaagttttcccgggtatgcaaaccgaaatcctcacttgaagagacggaagttctgtttgtattcattgggtacgatcgcaaggcccgtacgcacaatccttacaagctttcatcaaccttgaccaacatttatacaggttccagactccacgaagccggatgt

SEQ ID NO: 206 - DNA, 1671 bp, Artificial Sequence
  nsp3
gcaccctcatatcatgtggtgcgaggggatattgccacggccaccgaaggagtgattataaatgctgctaacagcaaaggacaacctggcggaggggtgtgcggagcgctgtataagaaattcccggaaagcttcgatttacagccgatcgaagtaggaaaagcgcgactggtcaaaggtgcagctaaacatatcattcatgccgtaggaccaaacttcaacaaagtttcggaggttgaaggtgacaaacagttggcagaggcttatgagtccatcgctaagattgtcaacgataacaattacaagtcagtagcgattccactgttgtccaccggcatcttttccgggaacaaagatcgactaacccaatcattgaaccatttgctgacagctttagacaccactgatgcagatgtagccatatactgcagggacaagaaatgggaaatgactctcaaggaagcagtggctaggagagaagcagtggaggagatatgcatatccgacgactcttcagtgacagaacctgatgcagagctggtgagggtgcatccgaagagttctttggctggaaggaagggctacagcacaagcgatggcaaaactttctcatatttggaagggaccaagtttcaccaggcggccaaggatatagcagaaattaatgccatgtggcccgttgcaacggaggccaatgagcaggtatgcatgtatatcctcggagaaagcatgagcagtattaggtcgaaatgccccgtcgaagagtcggaagcctccacaccacctagcacgctgccttgcttgtgcatccatgccatgactccagaaagagtacagcgcctaaaagcctcacgtccagaacaaattactgtgtgctcatcctttccattgccgaagtatagaatcactggtgtgcagaagatccaatgctcccagcctatattgttctcaccgaaagtgcctgcgtatattcatccaaggaagtatctcgtggaaacaccaccggtagacgagactccggagccatcggcagagaaccaatccacagaggggacacctgaacaaccaccacttataaccgaggatgagaccaggactagaacgcctgagccgatcatcatcgaagaggaagaagaggatagcataagtttgctgtcagatggcccgacccaccaggtgctgcaagtcgaggcagacattcacgggccgccctctgtatctagctcatcctggtccattcctcatgcatccgactttgatgtggacagtttatccatacttgacaccctggagggagctagcgtgaccagcggggcaacgtcagccgagactaactcttacttcgcaaagagtatggagtttctggcgcgaccggtgcctgcgcctcgaacagtattcaggaaccctccacatcccgctccgcgcacaagaacaccgtcacttgcacccagcagggcctgctcgagaaccagcctagtttccaccccgccaggcgtgaatagggtgatcactagagaggagctcgaggcgcttaccccgtcacgcactcctagcaggtcggtctcgagaaccagcctggtctccaacccgccaggcgtaaatagggtgattacaagagaggagtttgaggcgttcgtagcacaacaacaatgacggtttgatgcgggtgca

SEQ ID NO: 207 - DNA, 1821 bp, Artificial Sequence
  nsp4
tacatcttttcctccgacaccggtcaagggcatttacaacaaaaatcagtaaggcaaacggtgctatccgaagtggtgttggagaggaccgaattggagatttcgtatgccccgcgcctcgaccaagaaaaagaagaattactacgcaagaaattacagttaaatcccacacctgctaacagaagcagataccagtccaggaaggtggagaacatgaaagccataacagctagacgtattctgcaaggcctagggcattatttgaaggcagaaggaaaagtggagtgctaccgaaccctgcatcctgttcctttgtattcatctagtgtgaaccgtgccttttcaagccccaaggtcgcagtggaagcctgtaacgccatgttgaaagagaactttccgactgtggcttcttactgtattattccagagtacgatgcctatttggacatggttgacggagcttcatgctgcttagacactgccagtttttgccctgcaaagctgcgcagctttccaaagaaacactcctatttggaacccacaatacgatcggcagtgccttcagcgatccagaacacgctccagaacgtcctggcagctgccacaaaaagaaattgcaatgtcacgcaaatgagagaattgcccgtattggattcggcggcctttaatgtggaatgcttcaagaaatatgcgtgtaataatgaatattgggaaacgtttaaagaaaaccccatcaggcttactgaagaaaacgtggtaaattacattaccaaattaaaaggaccaaaagctgctgctctttttgcgaagacacataatttgaatatgttgcaggacataccaatggacaggtttgtaatggacttaaagagagacgtgaaagtgactccaggaacaaaacatactgaagaacggcccaaggtacaggtgatccaggctgccgatccgctagcaacagcgtatctgtgcggaatccaccgagagctggttaggagattaaatgcggtcctgcttccgaacattcatacactgtttgatatgtcggctgaagactttgacgctattatagccgagcacttccagcctggggattgtgttctggaaactgacatcgcgtcgtttgataaaagtgaggacgacgccatggctctgaccgcgttaatgattctggaagacttaggtgtggacgcagagctgttgacgctgattgaggcggctttcggcgaaatttcatcaatacatttgcccactaaaactaaatttaaattcggagccatgatgaaatctggaatgttcctcacactgtttgtgaacacagtcattaacattgtaatcgcaagcagagtgttgagagaacggctaaccggatcaccatgtgcagcattcattggagatgacaatatcgtgaaaggagtcaaatcggacaaattaatggcagacaggtgcgccacctggttgaatatggaagtcaagattatagatgctgtggtgggcgagaaagcgccttatttctgtggagggtttattttgtgtgactccgtgaccggcacagcgtgccgtgtggcagaccccctaaaaaggctgtttaagcttggcaaacctctggcagcagacgatgaacatgatgatgacaggagaagggcattgcatgaagagtcaacacgctggaaccgagtgggtattctttcagagctgtgcaaggcagtagaatcaaggtatgaaaccgtaggaacttccatcatagttatggccatgactactctagctagcagtgttaaatcattcagctacctgagaggggcccctataactctctacggc

SEQ ID NO: 208 - DNA, 117 bp, Artificial Sequence
  3'-UTR
atacagcagcaattggcaagctgcttacatagaactcgcggcgattggcatgccgctttaaaatttttattttatttttcttttcttttccgaatcggattttgtttttaatatttc

SEQ ID NO: 209 - DNA, 40 bp, Artificial Sequence
  polyA site
aaaaaaaaaaaaaaaaaaaaaaaaaaaaaaaaaaaaaaaa

I/We claim:

1. An RNA replicon encoding a recombinant pre-fusion SARS CoV-2 S protein or a fragment or variant thereof, wherein the recombinant pre-fusion SARS CoV-2 S protein or fragment or variant thereof comprises an S1 and an S2 domain, and comprises at least one mutation selected from the group consisting of a mutation of at least one amino acid in the loop region corresponding to amino acid residues 941-945 into proline (P), a mutation of the amino acid at position 892, a mutation of the amino acid at position 614, a mutation of the amino acid at position 572, a mutation of the amino acid at position 532, a disulfide bridge between residues 880 and 888, and a disulfide bridge between residues 884 and 893, wherein the numbering of the amino acid positions is according to the numbering of the amino acid positions in SEQ ID NO: 1.

2. The RNA replicon according to claim 1, wherein the amino acid at position 892 is not alanine (A), the amino acid at position 614 is not aspartic acid (D) or glycine (G), the amino acid at position 532 is not asparagine (N), and/or amino acid at position 572 is not threonine (T).

3. The RNA replicon according to claim 1, wherein the recombinant pre-fusion SARS CoV-2 S protein or fragment or variant thereof comprises at least a mutation of at least one amino acid in the loop region corresponding to amino acid residues 941-945 into P, and a mutation selected from the group consisting of a mutation of the amino acid at position 892, a mutation of the amino acid at position 614, a mutation of the amino acid at position 572, a mutation of the amino acid at position 532, a disulfide bridge between residues 880 and 888 and a disulfide bridge between residues 884 and 893.

4. The RNA replicon according to claim 3, wherein the recombinant pre-fusion SARS CoV-2 S protein or fragment or variant thereof comprises at least a mutation of at least one amino acid in the loop region corresponding to amino acid residues 941-945 into P, and a mutation selected from the group consisting of a mutation of the amino acid at position 892, a mutation of the amino acid at position 614, a mutation of the amino acid at position 572, a mutation of the amino acid at position 532, a disulfide bridge between residues 880 and 888 and a disulfide bridge between residues 884 and 893, provided that the recombinant pre-fusion SARS CoV-2 S protein does not comprise both the disulfide bridge between residues 880 and 888 and the disulfide bridge between residues 884 and 893.

5. The RNA replicon according to claim 1, wherein the recombinant pre-fusion SARS CoV-2 S protein or fragment or variant thereof comprises a disulfide bridge between residues 880 and 888.

6. The RNA replicon according to claim 1, wherein the recombinant pre-fusion SARS CoV-2 S protein or fragment or variant thereof comprises a mutation of the amino acid at position 942 into P.

7. The RNA replicon according to claim 1, wherein the recombinant pre-fusion SARS CoV-2 S protein or fragment or variant thereof comprises a mutation of the amino acid at position 892 into P.

8. The RNA replicon according to claim 1, wherein the recombinant pre-fusion SARS CoV-2 S protein or fragment or variant thereof comprises a mutation of the amino acid at position 614 into N.

9. The RNA replicon according to claim 1, wherein the recombinant pre-fusion SARS CoV-2 S protein or fragment or variant thereof comprises a mutation of the amino acid at position 532 into P.

10. The RNA replicon according to claim 1, wherein the recombinant pre-fusion SARS CoV-2 S protein or fragment or variant thereof comprises a mutation of the amino acid at position 572 into isoleucine (I).

11. The RNA replicon according to claim 1, wherein the recombinant pre-fusion SARS CoV-2 S protein or fragment or variant thereof comprises a mutation of the amino acid at position 942 into P, a disulfide bridge between the amino acid residues at positions 880 and 888 and a mutation of the amino acid at position 641 into N.

12. The RNA replicon according to claim 1, wherein the recombinant pre-fusion SARS CoV-2 S protein or fragment or variant thereof further comprises a deletion of the furin cleavage site.

13. The RNA replicon according to claim 12, wherein the deletion of the furin cleavage site comprises a mutation of the amino acid at position 682 into serine (S) and/or a mutation of the amino acid at position 685 into glycine (G).

14. The RNA replicon according to claim 1, wherein the recombinant pre-fusion SARS CoV-2 S protein or fragment or variant thereof further comprises a mutation of the amino acids at position 986 and 987 into P.

15. The RNA replicon according to claim 1, wherein the recombinant pre-fusion SARS CoV-2 S protein or fragment or variant thereof comprises an amino acid sequence selected from the group consisting of SEQ ID NO: 5-194 or a fragment or variant thereof.

16. The RNA replicon according to claim 1, wherein the recombinant pre-fusion SARS CoV-2 S protein or fragment or variant thereof does not comprise a signal peptide or a tag sequence.

17. The RNA replicon according to claim 1, wherein the recombinant pre-fusion SARS CoV-2 S protein or fragment or variant thereof comprises a truncated S2 domain.

18. The RNA replicon according to claim 17, wherein the transmembrane and cytoplasmic domain of the recombinant pre-fusion SARS CoV-2 S protein or fragment or variant thereof have been removed.

19. The RNA replicon according to claim 17, wherein a heterologous trimerization domain of the recombinant pre-fusion SARS CoV-2 S protein or fragment or variant thereof has been linked to the truncated S2 domain.

20. The RNA replicon according to claim 19, wherein the heterologous trimerization domain is a foldon domain comprising the amino acid sequence of SEQ ID NO:4.

21. The RNA replicon according to claim 1, comprising, ordered from the 5′- to 3′-end:
(1) a 5′ untranslated region (5′-UTR) required for nonstructural protein-mediated amplification of an RNA virus;
(2) a polynucleotide sequence encoding at least one, preferably all, of non-structural proteins of the RNA virus;
(3) a subgenomic promoter of the RNA virus;
(4) a polynucleotide sequence encoding the recombinant pre-fusion SARS CoV-2 S protein or the fragment or variant thereof; and
(5) a 3′ untranslated region (3′-UTR) required for nonstructural protein-mediated amplification of the RNA virus.

22. The RNA replicon according to claim 21, comprising, ordered from the 5′- to 3′-end,
(1) an alphavirus 5′ untranslated region (5′-UTR),
(2) a 5′ replication sequence of an alphavirus non-structural gene nsp1,
(3) a downstream loop (DLP) motif of a virus species,
(4) a polynucleotide sequence encoding an autoprotease peptide,
(5) a polynucleotide sequence encoding alphavirus non-structural proteins nsp1, nsp2, nsp3 and nsp4,
(6) an alphavirus subgenomic promoter,
(7) the polynucleotide sequence encoding the recombinant pre-fusion SARS CoV-2 S protein or the fragment or variant thereof,
(8) an alphavirus 3′ untranslated region (3′ UTR), and
(9) optionally, a poly adenosine sequence.

23. The RNA replicon of claim 22, wherein the DLP motif is from a virus species selected from the group consisting of Eastern equine encephalitis virus (EEEV), Venezuelan equine encephalitis virus (VEEV), Everglades virus (EVEV), Mucambo virus (MUCV), Semliki forest virus (SFV), Pixuna virus (PIXV), Middleburg virus (MTDV), Chikungunya virus (CHIKV), O'Nyong-Nyong virus (ONNV), Ross River virus (RRV), Barmah Forest virus (BF), Getah virus (GET), Sagiyama virus (SAGV), Bebaru virus (BEBV), Mayaro virus (MAYV), Una virus (UAV), Sindbis virus (SINV), Aura virus (AURAV), Whataroa virus (WHAV), Babanki virus (BABY), Kyzylagach virus (KYZV), Western equine encephalitis virus (WEEV), Highland J virus (HIV), Fort Morgan virus (FMV), Ndumu (NDUV), and Buggy Creek virus.

24. The RNA replicon of claim 22, wherein the autoprotease peptide is selected from the group consisting of porcine tesehovirus-1 2A (P2A), a foot-and-mouth disease virus (FMDV) 2A (F2A), an Equine Rhinitis A Virus (ERAV) 2A (E2A), a Thosea asigna virus 2A (T2A), a cytoplasmic polyhedrosis virus 2A (BmCPV2A), a Flacherie Virus 2 A (BmIFV2A), and a combination thereof, preferably, the autoprotease peptide comprising the peptide sequence of P2A.

25. An RNA replicon, comprising, ordered from the 5′- to 3′-end,
(1) a 5′-UTR having the polynucleotide sequence of SEQ ID NO:198,
(2) a 5′ replication sequence having the polynucleotide sequence of SEQ ID NO:199,
(3) a DLP motif comprising the polynucleotide sequence of SEQ ID NO:200,
(4) a polynucleotide sequence encoding a P2A sequence of SEQ ID NO:202,
(5) a polynucleotide sequence encoding alphavirus non-structural proteins nsp1, nsp2, nsp3 and nsp4 having the amino acid sequences encoded by the polynucleotide sequences of SEQ ID NO: 204, SEQ ID NO: 205, SEQ ID NO: 206 and SEQ ID NO: 207, respectively,
(6) a subgenomic promoter having polynucleotide sequence of SEQ ID NO: 196,
(7) a polynucleotide sequence encoding a pre-fusion SARS CoV-2 S protein having the amino acid sequence selected from the group consisting of SEQ ID NOs: 1-3 and 5-194, or a fragment or variant thereof, and
(8) a 3′ UTR having the polynucleotide sequence of SEQ ID NO:208.

26. The RNA replicon of claim 25, wherein:
(a) the polynucleotide sequence encoding the P2A sequence comprises SEQ ID NO: 201,
(b) the polynucleotide sequence encoding the alphavirus non-structural proteins nsp1, nsp2, nsp3 and nsp4 comprises SEQ ID NO: 204, SEQ ID NO: 205, SEQ ID NO: 206 and SEQ ID NO: 207, respectively, and
(c) the RNA replicon further comprises a poly adenosine sequence, preferably the poly adenosine sequence has the SEQ ID NO:209, at the 3′-end of the replicon.

27. A nucleic acid comprising a DNA sequence encoding the RNA replicon of claim 1, preferably, the nucleic acid further comprises a T7 promoter operably linked to the 5′-end of the DNA sequence, more preferably, the T7 promoter comprises the nucleotide sequence of SEQ ID NO: 197.

28. A composition comprising the RNA replicon of claim 1.

29. A vaccine against COVID-19 comprising the RNA replicon of claim 1.

30. A method for vaccinating a subject against COVID-19, the method comprising administering to the subject the vaccine according to claim 29.

31. A method for reducing infection and/or replication of SARS-CoV-2 in a subject, comprising administering to the subject a composition according to claim 28.

32. The method of claim 30, wherein the vaccine is administered as part of a prime-boost administration regimen.

33. The method of claim 32, wherein the prime-boost administration regimen is a homologous prime-boost administration regimen.

34. The method of claim 32, wherein the prime-boost administration regimen is a heterologous prime-boost administration regimen.

35. The method of claim 34, wherein the heterologous prime-boost administration regimen comprises a prime-administration of the vaccine of claim 29 to prime the immune response and a boost-administration of a vaccine comprising an adenoviral vector encoding a recombinant pre-fusion SARS CoV-2S protein or fragment thereof to boost the immune response.

36. The method of claim 34, wherein the heterologous prime-boost administration regimen comprises a prime-administration of a vaccine comprising an adenoviral vector encoding a recombinant pre-fusion SARS CoV-2S protein or fragment thereof to prime the immune response and a boost-administration of the vaccine of claim 29 to boost the immune response.

37. The method of claim 34, wherein the RNA replicon and adenoviral vector encode the same recombinant pre-fusion SARS CoV-2S protein or fragment thereof or a variant thereof.

38. The method of claim 32, wherein the boost-administration is administered at least about 2 weeks after the prime-administration.

39. The method of claim 32, wherein the boost-administration is administered about 2 weeks to about 12 weeks after the prime-administration.

40. The method of claim 38, wherein the boost-administration is administered about 4 weeks after the prime-administration

41. An isolated host cell comprising the nucleic acid according to claim 27.

42. An isolated host cell comprising the RNA replicon of any one of claim 1.

43. A method of making an RNA replicon, comprising transcribing the nucleic acid according to claim 27 in vivo or in vitro.
